(19) United States
(12) Patent Application Publication
(10) Pub. No.: US 2025/0179511 A1
(43) Pub. Date: Jun. 5, 2025

(54) CROSS TALK MODULATORS AND METHODS OF USE

(71) Applicant: PIONEER HI-BRED INTERNATIONAL, INC., JOHNSTON, IA (US)

(72) Inventors: SHANE E ABBITT, ANKENY, IA (US); AJITH ANAND, DAVIS, CA (US); PRIYANKA BHYRI, JOHNSTON, IA (US); NICHOLAS DOANE CHILCOAT, CLIVE, IA (US); SCOTT DIEHN, WEST DES MOINES, IA (US); JUSTIN FRERICHS, JOHNSTON, IA (US); WILLIAM JAMES GORDON-KAMM, URBANDALE, IA (US); YI JIA, ZIONSVILLE, IN (US); SUNIL KUMAR, HYDERABAD (IN); GREGORY D MAY, ANKENY, IA (US); AMITABH MOHANTY, HYDERABAD (IN); AJIT NOTT, JOHNSTON, IA (US); NAGESH SARDESAI, JOHNSTON, IA (US); LYNNE EILEEN SIMS, POLK CITY, IA (US); XINLI EMILY WU, JOHNSTON, IA (US); STEPHANE DESCHAMPS, WEST DES MOINES, IA (US)

(73) Assignee: PIONEER HI-BRED INTERNATIONAL, INC., JOHNSTON, IA (US)

(21) Appl. No.: 18/841,562

(22) PCT Filed: Feb. 23, 2023
(86) PCT No.: PCT/US2023/063146

§ 371 Date: Aug. 26, 2024

Related U.S. Application Data
(60) Provisional application No. 63/268,625, filed on Feb. 28, 2022.

(51) Int. Cl. C12N 15/82; C07K 14/415

(52) U.S. Cl. CPC C12N 15/8216; C07K 14/415

(57) ABSTRACT

Compositions and methods are provided for the improved expression and regulation of transgenes in plants, including a method of identifying gene expression gene cross-talk blocking and modulating elements, as well as the compositions of said elements. Also provided are plant cells and plants comprising or produced by the methods and compositions described herein.

### FIELD OF THE DISCLOSURE

[0001] The present disclosure relates to the field of plant molecular biology and plant genetic engineering. More specifically, it relates to novel cross talk blocker (CTB) sequences and their use to regulate gene expression in plants.

### REFERENCE TO SEQUENCE LISTING SUBMITTED ELECTRONICALLY

[0002] The official copy of the sequence listing is submitted electronically via EFS-Web as an XML formatted sequence listing with a file named 8930-WO-PCT_SEQ_LIST_ST26.XML created on Feb. 7, 2023, and having a size of 732 kilobytes and is filed concurrently with the specification. The sequence listing comprised in this XML formatted document is part of the specification and is herein incorporated by reference in its entirety.

### BACKGROUND

[0003] Transgenic commercial crops comprise one or more transgenes that confer a desired trait, and may also contain a selectable marker transgene. The structural organization of the genome and genomic insertion sites effect the efficacy of gene expression. Additionally, transgenes in molecular stacks and the regulatory elements driving their expression can influence the expression of nearby transgenes in unpredictable ways. Transcriptional interference and transcription read-through can be observed in multi-gene stacks. This affects transgene expression, and in some cases results in mis-timed gene expression. This phenomenon led to a transgenic trait development paradigm wherein large numbers of sister events are generated and subjected to phenotyping, to identify an event with the desired phenotype.

[0004] The current corn transformation method relies on the use of morphogenic genes for immature embryo transformation and leaf transformation. These methods rely on moderate to strong (viral enhancer) expression of morphogenic genes for early response. Transient expression or removal of the morphogenic gene is important for regenerating fertile plants. The use of viral enhancer in expression cassettes perturbed expression of neighboring gene resulting in either premature gene excision (transactivation) or influenced the expression of nearby transgenes (transcriptional interference). These issues in the past were mitigated by adding multiple copies of terminator sequences, with only partial success. Polynucleotide sequences that act as “insulators” or “cross-talk blockers” have been described in animals based on their ability to block enhancer-promoter interactions and/or serve as barriers against the spreading of the silencing effects of heterochromatin. To date, little is known about cross-talk blockers in plant systems.

[0005] There is a need for methods and compositions that improve the transgene expression in plants, including eliminating the potential for transgene cross-talk between transgenes in a molecular stack.

### SUMMARY

[0006] Methods and compositions are provided for the identification, testing, and use of cross-talk blocking elements (CTBs), that improve the pattern of transgene expression in plants.

[0007] In one aspect, a recombinant polynucleotide construct is provided, comprising: at least two cassettes, wherein each cassette comprises a promoter operably linked to a heterologous gene; and at least one cross-talk blocking element; wherein the cross-talk blocking element comprises a polynucleotide sharing at least 80% identity with at least 100 contiguous nucleotides of any one of SEQ ID NO: 1-267.

[0008] In one aspect, a recombinant polynucleotide construct is provided, comprising: at least two cassettes, wherein each cassette comprises a promoter operably linked to a heterologous gene; and at least one cross-talk blocking element; wherein the cross-talk blocking element comprises any one or more motif(s) as described in Table 13.

[0009] In one aspect, a recombinant polynucleotide construct is provided, comprising: at least two cassettes, wherein each cassette comprises a promoter operably linked to a heterologous gene; and at least one cross-talk blocking element; wherein the cross-talk blocking element is a Type I or Type II cross-talk blocking element.

[0010] In one aspect, a recombinant polynucleotide construct is provided, wherein the cross-talk blocking element is adjacent to one of the at least two cassettes.

[0011] In one aspect, a recombinant polynucleotide construct is provided, wherein the cross-talk blocking element is adjacent to at least two of the at least two cassettes.

[0012] In one aspect, a recombinant polynucleotide construct is provided, wherein at least one of the promoters of the at least two cassettes is constitutive.

[0013] In one aspect, a recombinant polynucleotide construct is provided, wherein at least one of the promoters of the at least two cassettes is tissue-specific or developmental stage-specific.

[0014] In one aspect, a plant cell comprising the recombinant polynucleotide construct of any of the claims is provided. In some aspects, the plant is selected from the group consisting of: maize, soybean, Arabidopsis, canola, wheat, rice, tobacco, cotton, alfalfa, sorghum, sunflower, or safflower.

[0015] In one aspect, a transgenic plant is provided, comprising the recombinant polynucleotide construct of any of the claims in at least one cell.

[0016] In one aspect, a method for identifying a cross-talk blocking sequence is provided, the method comprising: inserting a T-DNA sequence into a first gene into a plurality of Arabidopsis plants, wherein the T-DNA sequence comprises a plurality of CaMV35S enhancer sequences at the right border, assessing the expression pattern of the genes upstream and downstream of said first gene, selecting a plant comprising an upstream or downstream gene that is not upregulated, as compared to a control plant lacking the T-DNA sequence, sequencing said upstream or downstream gene and its 5′ regulatory elements, and selecting a CTB sequence upstream of the 5′ regulatory elements.

[0017] In one aspect, a method of increasing the expression of at least one transgene in a plant cell is provided, the method comprising: introducing into the plant cell the recombinant construct of any of the claims, incubating the cell under conditions that allow the expression of the transgene, and assessing the expression of said transgene; wherein the expression of said at least one transgene is decreased compared to that of a control plant comprising the transgene but lacking the cross-talk blocker.

### BRIEF DESCRIPTION OF THE DRAWINGS

[0018] The disclosure can be more fully understood from the following detailed description and the accompanying drawings and Sequence Listing, which form a part of this application.

[0019] FIG. 1A depicts a cross-talk blocker (CTB) sequence introduced into a vector between two independent DNA expression cassettes. FIG. 1B depicts a CTB placed distantly from the DNA expression cassettes.

[0020] FIG. 2 depicts an example of an expression vector with a CTB candidate.

[0021] FIG. 3 depicts a vector schematic for testing CTB elements in Arabidopsis.

[0022] FIG. 4 depicts a schematic map of expression vector used for Agrobacterium-mediated transformation of immature maize embryos. The position of the putative insulator-like candidate being tested is highlighted with a box.

[0023] FIG. 5 is a schematic map of plasmid (SEQ ID NO:142) used for transfecting maize leaf cell protoplasts for testing CTB-like activity. The CTB candidate is inserted between the CaMV35S enhancer and the CaMV35S minimal promoter driving ZS-GREEN fluorescence gene.

[0024] FIG. 6 is a schematic map of a plasmid (SEQ ID NO:143) used for transfecting a plant cell, wherein a CTB is present as a single element.

[0025] FIG. 7 is a schematic map of a plasmid (SEQ ID NO:144) used for transfecting a plant cell, wherein a CTB is present as a pair of elements.

[0026] FIG. 8 shows results from CTB testing in a pilot protoplast assay.

[0027] FIG. 9 shows results from testing potential CTB candidates identified from Arabidopsis.

[0028] FIG. 10 shows results from testing potential CTB candidates identified from the maize genome.

[0029] FIG. 11 depicts some of the polynucleotide motifs from CTB candidates, on the + and − strands. Numbers above sequence blocks indicate the Motif Number as listed in Table 13.

[0030] FIG. 12A-FIG. 12D depict exemplary constructs to test the hypothesis that transcriptional interference reduces the predictability of gene expression in plants. FIG. 12A represents expression of Gene 1 without influence from neighboring genes; FIG. 12B represents expression of Gene 2 without influence from neighboring genes; FIG. 12C represents transcriptional interference between two proximal genes, Gene 1 and Gene 2, in a genomic context; FIG. 12D represents a hypothetical scenario where an insulator element* (<500 bp) shields both genes from transcriptional interference. The location of insulator elements in these figures represents possible arrangements for simplicity. Other arrangements may be possible.

[0031] FIG. 13 is a graph that shows the relative expression patterns of vectors shown in FIG. 12A-FIG. 12D, respectively.

[0032] FIG. 14A-FIG. 14C depict exemplary constructs to test the hypothesis that a transcriptional enhancer reduces the predictability of gene expression in plants by influencing expression of neighboring genes. FIG. 14A represents the expression of genes in the absence of an enhancer element; FIG. 14B represents an enhancer's effects on the expression of two nearby genes; and FIG. 14C represents a hypothetical scenario where an insulator element* (<500 bp) shields a nearby gene from activation by an enhancer. The location of insulator elements in these figures represents possible arrangements for simplicity. Other arrangements may be possible.

[0033] FIG. 15 is a graph that shows the relative expression patterns of vectors shown in FIG. 14A-FIG. 14C, respectively.

[0034] FIG. 16 depicts germline excision for marker-free SSI technology.

[0035] FIG. 17 depicts vector configurations useful in the methods disclosed herein.

### DETAILED DESCRIPTION

[0036] The structural organization of the eukaryotic genome is complex. Chromatin arrangement and the interactions between different parts of the genome as a result of chromatin structure can influence gene expression.

[0037] The ability to effectively and efficiently improve crops through genetic engineering relies on finely tuned expression of integrated genes that is predictable in varying genetic backgrounds. However, the structural organization of the eukaryotic genome is complex. The expression of a gene is not only influenced by its associated regulatory elements but may also be affected by regulatory elements of nearby genes or by transcriptional interference between genes. One strategy for improving the predictability of gene expression is to use insulator elements to shield gene expression from outside influence.

[0038] Chromatin insulators were first discovered in animals based on their ability to block enhancer-promoter interactions (enhancer blocking insulators) and/or serve as barriers against the spread of silencing effects of heterochromatin (barrier insulators). To date, little is known about insulators in plant systems.

[0039] The performance of transgenes can vary significantly in different germplasm or environments due to the interaction of transgene×genetics or transgene×genetics×environments. Thus, a thorough trait evaluation in different germplasm and environments is necessary, which increases operation cost for trait evaluation in addition to the genetics selection and improvement. One hypothesis of trait variation across germplasm and environments is due to specific regulatory elements existing in specific genetics and causing these unfavorable interactions. For example, the nearby or distal endogenous enhancers could unfavorably increase the level of transgene expression and cause the unintended agronomic consequences. On the other hand, plant genomes often contain large fraction of transposon elements which can cause unintended transgene silencing.

[0040] The issue of transcriptional interference and transcription read-through is commonly observed in multi-gene stacks. This issue affects transgene expression and in some cases results in mis-timed gene expression, which is one of the aspects that is addressed herein.

[0041] Cross Talk Blockers (CTB) or Cassette Intervening Sequences (CIS) are DNA sequences that can preserve the expression characteristics of neighboring genes in plants. The functionality of these sequences may be used for optimizing transgene expression in plants or plant cells. Their use may preserve the expression concept of a gene cassette in a context where multiple expression cassettes may be present (e.g. stacked gene configurations).

[0042] Methods and compositions of the present disclosure include a novel trait design concept and application of insulator, also known as cross talk blocker (CTB), identification and elements to improve the robustness of transgene performance across different germplasm and environments by preventing or mitigating the transgene×genetics interaction or transgene×genetics×environments interaction. Insulator is one type of regulatory elements in genome to preserve the gene expression level of their target genes by two possible modes of actions or both. One mode of action is called enhancer-blocking effect and the other is silence barrier effect. Modifications to chromatin can regulate development and response to environmental cues. Modifications can also stabilize gene expression and potentially make it more predictable.

[0043] This innovation identifies endogenous insulator elements in crop genomes and place it as part of the regulatory elements of transgenes for the traits of interest. Methods and compositions of the present disclosure further include novel plant DNA sequences that can act to block inter-cassette expression interactions in a molecular stack, and/or serve as barriers against the spreading of the silencing effects of heterochromatin. More than 800 putative insulator elements are identified by computational search and 40 insulators or insulator pairs have been identified. The validated insulator will enable the trait performance independent on the genetics and environments so that the transgenes are robust to broad germplasm and environments.

[0044] A “cross talk blocker” (CTB) is a DNA sequence of variable length (e.g., from about 15 base pairs to about 4 kb), with one or more of the following properties: a cis element upstream of a promoter, a chromatin-restructuring element (stem-loop forming sequence), a silencing barrier, an enhancer blocker, an insulator, or any combination of the preceding. When introduced, these elements potentially modulate cross-talk between different expression cassettes in a gene stack. In some embodiments, the CTB DNA sequence is about 15 base pairs to about 500 base pairs. CTB candidate sequences were characterized using multiple approaches; a) protoplast screening, b) transient and c) stable transformation. DNA sequences identified will be used to improve; a) random integration, or b) site-specific integration including recombinase-mediated and nuclease-mediated targeted integration, or c) marker-free transgenics, or d) alternate explant transformation (such as leaf or seedling-derived tissues), and/or e) cassette expression in molecular stack.

[0045] Many modifications and other aspects disclosed herein will come to mind to one skilled in the art to which the disclosed compositions and methods pertain having the benefit of the teachings presented in the following descriptions and the associated drawings. Therefore, it is to be understood that the disclosures are not to be limited to the specific aspects disclosed and that modifications and other aspects are intended to be included within the scope of the appended claims. Although specific terms are employed herein, they are used in a generic and descriptive sense only and not for purposes of limitation.

[0046] It is also to be understood that the terminology used herein is for the purpose of describing particular aspects only and is not intended to be limiting. Terms used in the claims and specification are defined as set forth below unless otherwise specified. It must be noted that, as used in the specification and the appended claims, the singular forms “a,” “an” and “the” include plural referents unless the context clearly dictates otherwise.

[0047] As used herein, the terms “gene expression modulating element”, “modulating element”, or “modulating sequence” refer to a polynucleotide that when it is combined with a polynucleotide of interest it does at least one of the following: a) stabilizes the polynucleotide of interest by decreasing or preventing the influence of other nearby DNA sequences b) increases the expression of the polynucleotide of interest or c) decreases the expression of the polynucleotide of interest. When referring to “gene expression modulating activity” the activity is the stabilization of, the increasing of, or the decreasing of the expression of the polynucleotide of interest. When referring to a stabilization in gene expression or an increase or decrease in gene expression, it is meant when compared to an appropriate control. For example, a control of a similar sequence size would be used to determine a gene expression modulating element. A stabilization in gene expression indicates a decrease in the variability of expression. Variability in expression of a gene of interest could be influenced by the position of the gene in the genome and/or by surrounding genes and gene elements such as enhancers, promoters, and terminators.

[0048] As used herein, the terms “gene insulator element”, “gene insulator”, “insulator”, “INS”, “CTB”, “cross-talk blocker”, “cross talk blocker”, “CIS”, “cassette intervening sequence”, or “insulator sequence” refer to a polynucleotide that, when it is combined with a polynucleotide of interest, stabilizes the polynucleotide of interest by modulating the influence of other nearby DNA sequences. Collectively, these terms are referred to as “cross-talk modulators” or “cross talk modulators”. A polynucleotide of interest includes, but is not limited to, an expression cassette comprising a promoter, gene of interest, and a terminator, or a promoter driving transcription. “Activity” with respect to these cross-talk modulators means the modification of, control of, or stabilization of the expression of a polynucleotide of interest.

[0049] The term “modulate” as used herein, refers to modifying, controlling, or stabilizing the strength of expression of a polynucleotide of interest including, but not limited to, up or down regulation.

[0050] The term “modulator” as used herein, refers to a polynucleotide that modifies, controls, or stabilizes the expression of a polynucleotide of interest including, but not limited to, up or down regulation of the polynucleotide of interest.

[0051] The term “operatively associated,” as used herein, refers to DNA sequences on a single DNA molecule which are associated so that the function of one is affected by the other. Thus, a transcription initiation region is operatively associated with a structural gene when it is capable of affecting the expression of that structural gene (i.e., the structural gene is under the transcriptional control of the transcription initiation region). The transcription initiation region is said to be “upstream” from the structural gene, which is in turn said to be “downstream” from the transcription initiation region.

[0052] “Operably linked” is intended to mean a functional linkage between two or more elements. For example, an operable linkage between a polynucleotide of interest and a regulatory sequence (i.e., a promoter) is a functional link that allows for expression of the polynucleotide of interest. Operably linked elements may be contiguous or non-contiguous. When used to refer to the joining of two protein coding regions, by operably linked is intended that the coding regions are in the same reading frame.

[0053] “Intergenic region” or “intergenic sequence” is a group of nucleotides that lie in tandem and is in between two coding regions. The intergenic region is not translated.

[0054] A “cassette” is a group of nucleotide sequences that lie in tandem. A cassette is usually integrated or exchanged as a unit. For example, a DNA cassette can be the DNA that is used in transformation. It can also be the DNA that gets integrated during recombinase-mediated integration.

[0055] “Fragment” is intended a portion of the polynucleotide or a portion of the amino acid sequence and hence protein encoded thereby. Fragments of a polynucleotide may encode protein fragments that retain the biological activity of the native protein and hence influence male fertility. Alternatively, fragments of a polynucleotide that are useful as hybridization probes generally do not encode fragment proteins retaining biological activity. Thus, fragments of a nucleotide sequence may range from at least about 20 nucleotides, about 50 nucleotides, about 100 nucleotides, and up to the full-length polynucleotide encoding the polypeptides disclosed herein.

[0056] “Variants” is intended to mean substantially similar sequences. For polynucleotides, a variant comprises a polynucleotide having a deletion (i.e., truncations) at the 5′ and/or 3′ end and/or a deletion and/or addition of one or more nucleotides at one or more internal sites within the native polynucleotide and/or a substitution of one or more nucleotides at one or more sites in the native polynucleotide.

[0057] As used herein, “heterologous” refers to the difference between the original environment, location, or composition of a particular polynucleotide or polypeptide sequence and its current environment, location, or composition. Non-limiting examples include differences in taxonomic derivation (e.g., a polynucleotide sequence obtained from Zea mays would be heterologous if inserted into the genome of an Oryza sativa plant, or of a different variety or cultivar of Zea mays; or a polynucleotide obtained from a bacterium was introduced into a cell of a plant), or sequence (e.g., a polynucleotide sequence obtained from Zea mays, isolated, modified, and re-introduced into a maize plant). “heterologous” in reference to a sequence can refer to a sequence that originates from a different species, variety, foreign species, or, if from the same species, is substantially modified from its native form in composition and/or genomic locus by deliberate human intervention. For example, a promoter operably linked to a heterologous polynucleotide is from a species different from the species from which the polynucleotide was derived, or, if from the same/analogous species, one or both are substantially modified from their original form and/or genomic locus, or the promoter is not the native promoter for the operably linked polynucleotide. Alternatively, one or more regulatory region(s) and/or a polynucleotide provided herein may be entirely synthetic.

[0058] The similarity or relationship between two or more polynucleotide or polypeptide sequences may be determined by sequence alignment and percent identity calculations, by any method known in the art. In a non-limiting example of a mathematical algorithm utilized for the comparison of sequences is the algorithm of Needleman and Wunsch, (1970) J. Mol. Biol. 48(3):443-453, used GAP Version 10 software to determine sequence identity or similarity using the following default parameters: % identity and % similarity for a nucleic acid sequence using GAP Weight of 50 and Length Weight of 3, and the nwsgapdna.cmpii scoring matrix (watson.nih.go.jp/-gcg/man/rundata/nwsgapdna.cmp); % identity or % similarity for an amino acid sequence using GAP weight of 8 and length weight of 2, and the BLOSUM62 scoring program. Equivalent programs may also be used. “Equivalent program” is used herein to refer to any sequence comparison program that, for any two sequences in question, generates an alignment having identical nucleotide residue matches and an identical percent sequence identity when compared to the corresponding alignment generated by GAP Version 10.

[0059] “Percent (%) sequence identity” with respect to a reference sequence (subject) is determined as the percentage of amino acid residues or nucleotides in a candidate sequence (query) that are identical with the respective amino acid residues or nucleotides in the reference sequence, after aligning the sequences and introducing gaps, if necessary, to achieve the maximum percent sequence identity, and not considering any amino acid conservative substitutions as part of the sequence identity. Alignment for purposes of determining percent sequence identity can be achieved in various ways that are within the skill in the art, for instance, using publicly available computer software such as BLAST, BLAST-2. Those skilled in the art can determine appropriate parameters for aligning sequences, including any algorithms needed to achieve maximal alignment over the full length of the sequences being compared. The percent identity between the two sequences is a function of the number of identical positions shared by the sequences (e.g., percent identity of query sequence=number of identical positions between query and subject sequences/total number of positions of query sequence×100).

[0060] “Plant” generically includes whole plants, plant organs, plant tissues, seeds, plant cells, seeds and progeny of the same. The plant is a monocot or dicot. Plant cells include, without limitation, cells from seeds, suspension cultures, embryos, meristematic regions, callus tissue, leaves, roots, shoots, gametophytes, sporophytes, pollen and microspores. A “plant element” is intended to reference either a whole plant or a plant component, which may comprise differentiated and/or undifferentiated tissues, for example but not limited to plant tissues, parts, and cell types. In one embodiment, a plant element is one of the following: whole plant, seedling, meristematic tissue, ground tissue, vascular tissue, dermal tissue, seed, leaf, root, shoot, stem, flower, fruit, stolon, bulb, tuber, corm, keiki, shoot, bud, tumor tissue, and various forms of cells and culture (e.g., single cells, protoplasts, embryos, callus tissue). It should be noted that a protoplast is not technically an “intact” plant cell (as naturally found with all components), as protoplasts lack a cell wall. “Plant organ” refers to plant tissue or a group of tissues that constitute a morphologically and functionally distinct part of a plant. A plant element” is synonymous to a portion” of a plant, and refers to any part of the plant, and can include distinct tissues and/or organs, and may be used interchangeably with tissue” throughout. Similarly, a plant reproductive element” is intended to generically reference any part of a plant that is able to initiate other plants via either sexual or asexual reproduction of that plant, for example but not limited to: seed, seedling, root, shoot, cutting, scion, graft, stolon, bulb, tuber, corm, keiki, or bud. The plant element may be in plant or in a plant organ, tissue culture, or cell culture.

[0061] “Control” or “control plant” or “control plant cell” refers to a reference for measuring changes in phenotype of the subject organism or cell.

[0062] “Somatic embryo” is defined as a multicellular structure that progresses through developmental stages that are similar to the development of a zygotic embryo, including formation of globular and transition-stage embryos, formation of an embryo axis and a scutellum, and accumulation of lipids and starch. Single somatic embryos derived from a zygotic embryo germinate to produce single non-chimeric plants, which may originally derive from a single-cell.

[0063] Embryogenic callus is defined as a friable or non-friable mixture of undifferentiated or partially undifferentiated cells which subtend proliferating primary and secondary somatic embryos capable of regenerating into mature fertile plants.

[0064] Somatic meristem is defined as a multicellular structure that is similar to the apical meristem which is part of a seed-derived embryo, characterized as having an undifferentiated apical dome flanked by leaf primorida and subtended by vascular initials, the apical dome giving rise to an above-ground vegetative plant. Such somatic meristems can form single or fused clusters of meristems.

[0065] Organogenic callus is defined as a compact mixture of differentiated growing plant structures, including but not limited to apical meristems, root meristems, leaves and roots.

[0066] Germination is the growth of a regenerable structure to form a plantlet which continues growing to produce a plant.

[0067] “Trait” refers to a physiological, morphological, biochemical, or physical characteristic of a plant or particular plant material or cell. In some instances, this characteristic is visible to the human eye, such as seed or plant size, or can be measured by biochemical techniques, such as detecting the protein, starch, or oil content of seed or leaves, or by observation of a metabolic or physiological process, e.g. by measuring uptake of carbon dioxide, or by the observation of the expression level of a gene or genes, e.g., by employing Northern analysis, RT-PCR, microarray gene expression assays, or reporter gene expression systems, or by agricultural observations such as stress tolerance, yield, or pathogen tolerance

[0068] “Polynucleotide of interest” includes any nucleotide sequence encoding a protein or polypeptide that improves desirability of crops, i.e. a trait of agronomic interest. Polynucleotides of interest include, but are not limited to: polynucleotides encoding important traits for agronomics, herbicide-resistance, insecticidal resistance, disease resistance, nematode resistance, herbicide resistance, microbial resistance, fungal resistance, viral resistance, fertility or sterility, grain characteristics, commercial products, phenotypic marker, or any other trait of agronomic or commercial importance. A polynucleotide of interest may additionally be utilized in either the sense or anti-sense orientation. Further, more than one polynucleotide of interest may be utilized together, or “stacked”, to provide additional benefit.

[0069] “3′ non-coding sequences”, “transcription terminator” or “termination sequences” refer to DNA sequences located downstream of a coding sequence and include polyadenylation recognition sequences and other sequences encoding regulatory signals capable of affecting mRNA processing or gene expression. The polyadenylation signal is usually characterized by affecting the addition of polyadenylic acid tracts to the 3′ end of the mRNA precursor. The use of different 3′ non-coding sequences is exemplified by Ingelbrecht et al., (1989) Plant Cell 1:671-680.

[0070] “Coding sequence” refers to a polynucleotide sequence which codes for a specific amino acid sequence. “Regulatory sequences” refer to nucleotide sequences located upstream (5′ non-coding sequences), within, or downstream (3′ non-coding sequences) of a coding sequence, and which influence the transcription, RNA processing or stability, or translation of the associated coding sequence. Regulatory sequences include, but are not limited to, promoters, translation leader sequences, 5′ untranslated sequences, 3′ untranslated sequences, introns, polyadenylation target sequences, RNA processing sites, effector binding sites, and stem-loop structures.

[0071] “Expression cassette” as used herein means a DNA construct comprising a regulatory element of the embodiments operably linked to a heterologous polynucleotide expressing a transcript or gene of interest. Such expression cassettes will comprise a transcriptional initiation region comprising one of the regulatory element polynucleotide sequences of the present disclosure, or variants or fragments thereof, operably linked to the heterologous nucleotide sequence. Such an expression cassette may be provided with a plurality of restriction sites for insertion of the polynucleotide sequence to be under the transcriptional regulation of the regulatory regions. The expression cassette may additionally contain selectable marker genes as well as 3′ termination regions

[0072] “Promoter” is a region of DNA involved in recognition and binding of RNA polymerase and other proteins to initiate transcription. The promoter sequence consists of proximal and more distal upstream elements, the latter elements often referred to as enhancers. “enhancer” is a DNA sequence that can stimulate promoter activity, and may be an innate element of the promoter or a heterologous element inserted to enhance the level or tissue-specificity of a promoter. Promoters may be derived in their entirety from a native gene, or be composed of different elements derived from different promoters found in nature, and/or comprise synthetic DNA segments. It is understood by those skilled in the art that different promoters may direct the expression of a gene in different tissues or cell types, or at different stages of development, or in response to different environmental conditions. It is further recognized that since in most cases the exact boundaries of regulatory sequences have not been completely defined, DNA fragments of some variation may have identical promoter activity.

[0073] Promoters useful for marker free CRE-mediated excision include those expressed in reproductive tissues or cells including, but not limited to, ear, tassel, ovule, anther, and more particularly germline cells such as egg, pollen, or sperm.

### Recombinant Constructs for Plant Transformation

[0074] The compositions disclosed herein, optionally further comprising one or more polynucleotide(s) of interest, can be introduced into a cell. Cells include, but are not limited to, human, non-human, animal, bacterial, fungal, insect, yeast, non-conventional yeast, and plant cells as well as plants and seeds produced by the methods described herein.

[0075] Standard recombinant DNA and molecular cloning techniques used herein are well known in the art and are described more fully in Sambrook et al., Molecular Cloning: A Laboratory Manual; Cold Spring Harbor Laboratory: Cold Spring Harbor, NY (1989). Transformation methods are well known to those skilled in the art and are described infra.

[0076] Vectors and constructs include circular plasmids, and linear polynucleotides, comprising a polynucleotide of interest and optionally other components including linkers, adapters, regulatory or analysis. In some examples a recognition site and/or target site can be comprised within an intron, coding sequence, 5′ UTRs, 3′ UTRs, and/or regulatory regions.

### Polynucleotides of Interest

[0077] Polynucleotides of interest are further described herein and include polynucleotides reflective of the commercial markets and interests of those involved in the development of the crop. Crops and markets of interest change, and as developing nations open up world markets, new crops and technologies will emerge also. In addition, as our understanding of agronomic traits and characteristics such as yield and heterosis increase, the choice of genes for genetic engineering will change accordingly.

[0078] General categories of polynucleotides of interest include, for example, genes of interest involved in information, such as zinc fingers, those involved in communication, such as kinases, and those involved in housekeeping, such as heat shock proteins. More specific polynucleotides of interest include, but are not limited to, genes involved in traits of agronomic interest such as but not limited to, crop yield, grain quality, crop nutrient content, starch and carbohydrate quality and quantity as well as those affecting kernel size, sucrose loading, protein quality and quantity, nitrogen fixation and/or utilization, fatty acid and oil composition, genes encoding proteins conferring resistance to abiotic stress (such as drought, nitrogen, temperature, salinity, toxic metals or trace elements, or those conferring resistance to toxins such as pesticides and herbicides), genes encoding proteins conferring resistance to biotic stress (such as attacks by fungi, viruses, bacteria, insects, and nematodes, and development of diseases associated with these organisms).

[0079] Agronomically important traits such as oil, starch, and protein content can be genetically altered in addition to using traditional breeding methods. Modifications include increasing content of oleic acid, saturated and unsaturated oils, increasing levels of lysine and sulfur, providing essential amino acids, and also modification of starch. Hordothionin protein modifications are described in U.S. Pat. Nos. 5,703,049, 5,885,801, 5,885,802, and 5,990,389.

[0080] Polynucleotide sequences of interest may encode proteins involved in providing disease or pest resistance. By “disease resistance” or “pest resistance” is intended that the plants avoid the harmful symptoms that are the outcome of the plant-pathogen interactions. Pest resistance genes may encode resistance to pests that have great yield drag such as rootworm, cutworm, European Corn Borer, and the like. Disease resistance and insect resistance genes such as lysozymes or cecropins for antibacterial protection, or proteins such as defensins, glucanases or chitinases for antifungal protection, or Bacillus thuringiensis endotoxins, protease inhibitors, collagenases, lectins, or glycosidases for controlling nematodes or insects are all examples of useful gene products. Genes encoding disease resistance traits include detoxification genes, such as against fumonisin (U.S. Pat. No. 5,792,931); avirulence (avr) and disease resistance (R) genes (Jones et al. (1994) Science 266:789; Martin et al. (1993) Science 262:1432; and Mindrinos et al. (1994) Cell 78:1089); and the like.

[0081] Insect resistance genes may encode resistance to pests that have great yield drag such as rootworm, cutworm, European Corn Borer, and the like. Such genes include, for example, Bacillus thuringiensis toxic protein genes (U.S. Pat. Nos. 5,366,892; 5,747,450; 5,736,514; 5,723,756; 5,593,881; and Geiser et al. (1986) Gene 48:109); and the like. In further embodiments, genes encoding pesticidal proteins may include insecticidal proteins from Pseudomonas sp. such as PSEEN3174 (Monalysin, (2011) PLoS Pathogens, 7:1-13), from Pseudomonas protegens strain CHAO and Pf5 (previously fluorescens) (Pechy-Tarr, (2008) Environmental Microbiology 10:2368-2386: GenBank Accession No. EU400157); from Pseudomonas taiwanensis (Liu, et al., (2010) J. Agric. Food Chem. 58:12343-12349) and from Pseudomonas pseudoalcaligenes (Zhang, et al., (2009) Annals of Microbiology 59:45-50 and Li, et al., (2007) Plant Cell Tiss. Organ Cult. 89:159-168); insecticidal proteins from Photorhabdus sp. and Xenorhabdus sp. (Hinchliffe, et al., (2010) The Open Toxinology Journal 3:101-118 and Morgan, et al., (2001) Applied and Envir. Micro. 67:2062-2069), U.S. Pat. Nos. 6,048,838, and 6,379,946; a PIP-1 polypeptide of U.S. Pat. No. 9,688,730; an AfIP-1A and/or AfIP-1B polypeptide of U.S. Pat. No. 9,475,847; a PIP-47 polypeptide of U.S. Pat. No. 10,006,045; an IPD045 polypeptide, an IPD064 polypeptide, an IPD074 polypeptide, an IPD075 polypeptide, and an IPD077 polypeptide of PCT Publication Number WO 2016/114973; an IPD080 polypeptide of International Patent Application Publication Number WO2018/075350; an IPD078 polypeptide, an IPD084 polypeptide, an IPD085 polypeptide, an IPD086 polypeptide, an IPD087 polypeptide, an IPD088 polypeptide, and an IPD089 polypeptide of International Patent Application Publication Number WO2018/084936; PIP-72 polypeptide of US Patent Publication Number US20160366891; a PtIP-50 polypeptide and a PtIP-65 polypeptide of US Patent Application Publication Number US20170166921; an IPD098 polypeptide, an IPD059 polypeptide, an IPD108 polypeptide, an IPD109 polypeptide of International Patent Application Publication Number WO2018/232072; a PtIP-83 polypeptide of US Publication Number US20160347799; a PtIP-96 polypeptide of US Publication Number US20170233440; an IPD079 polypeptide of PCT Publication Number WO2017/23486; an IPD082 polypeptide of International Patent Application Publication Number WO 2017/105987, an IPD090 polypeptide of International Patent Application Publication Number WO2017/192560, an IPD093 polypeptide of International Patent Application Publication Number WO2018/111551; an IPD103 polypeptide of International Patent Application Publication Number WO2018/005411; an IPD101 polypeptide of International Patent Application Publication Number WO2018/118811; an IPD121 polypeptide of International Patent Application Publication Number WO2018/208882, and 6-endotoxins including, but not limited to, the Cry1, Cry2, Cry3, Cry4, Cry5, Cry6, Cry7, Cry8, Cry9, Cry10, Cry11, Cry12, Cry13, Cry14, Cry15, Cry16, Cry17, Cry18, Cry19, Cry20, Cry21, Cry22, Cry23, Cry24, Cry25, Cry26, Cry27, Cry 28, Cry 29, Cry 30, Cry31, Cry32, Cry33, Cry34, Cry35,Cry36, Cry37, Cry38, Cry39, Cry40, Cry41, Cry42, Cry43, Cry44, Cry45, Cry 46, Cry47, Cry49, Cry50, Cry51, Cry52, Cry53, Cry 54, Cry55, Cry56, Cry57, Cry58, Cry59, Cry60, Cry61, Cry62, Cry63, Cry64, Cry65, Cry66, Cry67, Cry68, Cry69, Cry70, Cry71, and Cry 72 classes of 6-endotoxin genes and the B. thuringiensis cytolytic Cyt1 and Cyt2 genes.

[0082] An “herbicide resistance protein” or a protein resulting from expression of an “herbicide resistance-encoding nucleic acid molecule” includes proteins that confer upon a cell the ability to tolerate a higher concentration of an herbicide than cells that do not express the protein, or to tolerate a certain concentration of an herbicide for a longer period of time than cells that do not express the protein. Herbicide resistance traits may be introduced into plants by genes coding for resistance to herbicides that act to inhibit the action of acetolactate synthase (ALS, also referred to as acetohydroxyacid synthase, AHAS), in particular the sulfonylurea (UK:sulphonylurea) type herbicides, genes coding for resistance to herbicides that act to inhibit the action of glutamine synthase, such as phosphinothricin or basta (e.g., the bar gene), glyphosate (e.g., the EPSP synthase gene and the GAT gene), HPPD inhibitors (e.g., the HPPD gene) or other such genes known in the art. See, for example, U.S. Pat. Nos. 7,626,077, 5,310,667, 5,866,775, 6,225,114, 6,248,876, 7,169,970, 6,867,293, and 9,187,762. The bar gene encodes resistance to the herbicide basta, the nptII gene encodes resistance to the antibiotics kanamycin and geneticin, and the ALS-gene mutants encode resistance to the herbicide chlorsulfuron. Exemplary herbicide tolerance coding sequences are known in the art. As embodiments of herbicide tolerance coding sequences that can be operably linked to the regulatory elements of the subject disclosure, the following traits are provided. The glyphosate herbicide contains a mode of action by inhibiting the EPSPS enzyme (5-enolpyruvylshikimate-3-phosphate synthase). This enzyme is involved in the biosynthesis of aromatic amino acids that are essential for growth and development of plants. Various enzymatic mechanisms are known in the art that can be utilized to inhibit this enzyme. The genes that encode such enzymes can be operably linked to the gene regulatory elements of the subject disclosure. In an embodiment, selectable marker genes include, but are not limited to genes encoding glyphosate resistance genes include: mutant EPSPS genes such as 2mEPSPS genes, cp4 EPSPS genes, mEPSPS genes, dgt-28 genes; aroA genes; and glyphosate degradation genes such as glyphosate acetyl transferase genes (gat) and glyphosate oxidase genes (gox). These traits are currently marketed as Gly-Tol™, Optimum® GAT®, Agrisure® GT and Roundup Ready®. Resistance genes for glufosinate and/or bialaphos compounds include dsm-2, bar and pat genes. The bar and pat traits are currently marketed as LibertyLink®. Also included are tolerance genes that provide resistance to 2,4-D such as aad-1 genes (it should be noted that aad-1 genes have further activity on arloxyphenoxypropionate herbicides) and aad-12 genes (it should be noted that aad-12 genes have further activity on pyidyloxyacetate synthetic auxins). These traits are marketed as Enlist® crop protection technology. Resistance genes for ALS inhibitors (sulfonylureas, imidazolinones, triazolopyrimidines, pyrimidinylthiobenzoates, and sulfonylamino-carbonyl-triazolinones) are known in the art. These resistance genes most commonly result from point mutations to the ALS encoding gene sequence. Other ALS inhibitor resistance genes include hra genes, the csr1-2 genes, Sr-HrA genes, and surB genes. Some of the traits are marketed under the tradename Clearfield®. Herbicides that inhibit HPPD include the pyrazolones such as pyrazoxyfen, benzofenap, and topramezone; triketones such as mesotrione, sulcotrione, tembotrione, benzobicyclon; and diketonitriles such as isoxaflutole. These exemplary HPPD herbicides can be tolerated by known traits. Examples of HPPD inhibitors include hppdPF_W336 genes (for resistance to isoxaflutole) and avhppd-03 genes (for resistance to meostrione). An example of oxynil herbicide tolerant traits include the bxn gene, which has been showed to impart resistance to the herbicide/antibiotic bromoxynil. Resistance genes for dicamba include the dicamba monooxygenase gene (dmo) as disclosed in International PCT Publication No. WO 2008/105890. Resistance genes for PPO or PROTOX inhibitor type herbicides (e.g., acifluorfen, butafenacil, flupropazil, pentoxazone, carfentrazone, fluazolate, pyraflufen, aclonifen, azafenidin, flumioxazin, flumiclorac, bifenox, oxyfluorfen, lactofen, fomesafen, fluoroglycofen, and sulfentrazone) are known in the art. Exemplary genes conferring resistance to PPO include over expression of a wild-type Arabidopsis thaliana PPO enzyme (Lermontova I and Grimm B, (2000) Overexpression of plastidic protoporphyrinogen IX oxidase leads to resistance to the diphenyl-ether herbicide acifluorfen. Plant Physiol 122:75-83.), the B. subtilis PPO gene (Li, X. and Nicholl D. 2005. Development of PPO inhibitor-resistant cultures and crops. Pest Manag. Sci. 61:277-285 and Choi K W, Han O, Lee H J, Yun Y C, Moon Y H, Kim M K, Kuk Y I, Han S U and Guh J O, (1998) Generation of resistance to the diphenyl ether herbicide, oxyfluorfen, via expression of the Bacillus subtilis protoporphyrinogen oxidase gene in transgenic tobacco plants. Biosci Biotechnol Biochem 62:558-560.) Resistance genes for pyridinoxy or phenoxy proprionic acids and cyclohexones include the ACCase inhibitor-encoding genes (e.g., Accl-S1, Accl-S2 and Accl-S3). Exemplary genes conferring resistance to cyclohexanediones and/or aryloxyphenoxypropanoic acid include haloxyfop, diclofop, fenoxyprop, fluazifop, and quizalofop. Finally, herbicides can inhibit photosynthesis, including triazine or benzonitrile are provided tolerance by psbA genes (tolerance to triazine), 1s+ genes (tolerance to triazine), and nitrilase genes (tolerance to benzonitrile). The above list of herbicide tolerance genes is not meant to be limiting. Any herbicide tolerance genes are encompassed by the present disclosure.

[0083] Furthermore, it is recognized that the polynucleotide of interest may also comprise antisense sequences complementary to at least a portion of the messenger RNA (mRNA) for a targeted gene sequence of interest. Antisense nucleotides are constructed to hybridize with the corresponding mRNA. Modifications of the antisense sequences may be made as long as the sequences hybridize to and interfere with expression of the corresponding mRNA. In this manner, antisense constructions having 70%, 80%, or 85% sequence identity to the corresponding antisense sequences may be used. Furthermore, portions of the antisense nucleotides may be used to disrupt the expression of the target gene. Generally, sequences of at least 50 nucleotides, 100 nucleotides, 200 nucleotides, or greater may be used.

[0084] In addition, the polynucleotide of interest may also be used in the sense orientation to suppress the expression of endogenous genes in plants. Methods for suppressing gene expression in plants using polynucleotides in the sense orientation are known in the art. The methods generally involve transforming plants with a DNA construct comprising a promoter that drives expression in a plant operably linked to at least a portion of a nucleotide sequence that corresponds to the transcript of the endogenous gene. Typically, such a nucleotide sequence has substantial sequence identity to the sequence of the transcript of the endogenous gene, generally greater than about 65% sequence identity, about 85% sequence identity, or greater than about 95% sequence identity. See U.S. Pat. Nos. 5,283,184 and 5,034,323.

[0085] The polynucleotide of interest can also be a phenotypic marker. A phenotypic marker is screenable or a selectable marker that includes visual markers and selectable markers whether it is a positive or negative selectable marker. Any phenotypic marker can be used. Specifically, a selectable or screenable marker comprises a DNA segment that allows one to identify, or select for or against a molecule or a cell that comprises it, often under particular conditions. These markers can encode an activity, such as, but not limited to, production of RNA, peptide, or protein, or can provide a binding site for RNA, peptides, proteins, inorganic and organic compounds or compositions and the like.

[0086] Examples of selectable markers include, but are not limited to, DNA segments that comprise restriction enzyme sites; DNA segments that encode products which provide resistance against otherwise toxic compounds including antibiotics, such as, spectinomycin, ampicillin, kanamycin, tetracycline, Basta, neomycin phosphotransferase II (NEO) and hygromycin phosphotransferase (HPT)); DNA segments that encode products which are otherwise lacking in the recipient cell (e.g., tRNA genes, auxotrophic markers); DNA segments that encode products which can be readily identified (e.g., phenotypic markers such as β-galactosidase, GUS; fluorescent proteins such as green fluorescent protein (GFP), cyan (CFP), yellow (YFP), red (RFP), and cell surface proteins); the generation of new primer sites for PCR (e.g., the juxtaposition of two DNA sequence not previously juxtaposed), the inclusion of DNA sequences not acted upon or acted upon by a restriction endonuclease or other DNA modifying enzyme, chemical, etc.; and, the inclusion of a DNA sequences required for a specific modification (e.g., methylation) that allows its identification.

[0087] Additional selectable markers include genes that confer resistance to herbicidal compounds, such as sulphonylureas, glufosinate ammonium, bromoxynil, imidazolinones, and 2,4-dichlorophenoxyacetate (2,4-D). See for example, Acetolactase synthase (ALS) for resistance to sulfonylureas, imidazolinones, triazolopyrimidine sulfonamides, pyrimidinylsalicylates and sulphonylaminocarbonyl-triazolinones (Shaner and Singh, 1997, Herbicide Activity: Toxicol Biochem Mol Biol 69-110); glyphosate resistant 5-enolpyruvylshikimate-3-phosphate (EPSPS) (Saroha et al. 1998, J. Plant Biochemistry & Biotechnology Vol 7:65-72); Polynucleotides of interest includes genes that can be stacked or used in combination with other traits, such as but not limited to herbicide resistance or any other trait described herein. Polynucleotides of interest and/or traits can be stacked together in a complex trait locus as described in US20130263324 published 3 Oct. 2013 and in WO/2013/112686, published 1 Aug. 2013.

[0088] A polypeptide of interest includes any protein or polypeptide that is encoded by a polynucleotide of interest described herein.

[0089] Further provided are methods for identifying at least one plant cell, comprising in its genome, a polynucleotide of interest integrated at the target site. A variety of methods are available for identifying those plant cells with insertion into the genome at or near to the target site. Such methods can be viewed as directly analyzing a target sequence to detect any change in the target sequence, including but not limited to PCR methods, sequencing methods, nuclease digestion, Southern blots, and any combination thereof. See, for example, US20090133152 published 21 May 2009. The method also comprises recovering a plant from the plant cell comprising a polynucleotide of interest integrated into its genome. The plant may be sterile or fertile. It is recognized that any polynucleotide of interest can be provided, integrated into the plant genome at the target site, and expressed in a plant.

### Optimization of Sequences for Expression in Plants

[0090] Methods are available in the art for synthesizing plant-preferred genes. Additional sequence modifications are known to enhance gene expression in a plant host. These include, for example, elimination of: one or more sequences encoding spurious polyadenylation signals, one or more exon-intron splice site signals, one or more transposon-like repeats, and other such well-characterized sequences that may be deleterious to gene expression. The G-C content of the sequence may be adjusted to levels average for a given plant host, as calculated by reference to known genes expressed in the host plant cell. When possible, the sequence is modified to avoid one or more predicted hairpin secondary mRNA structures. Thus, “a plant-optimized nucleotide sequence” of the present disclosure comprises one or more of such sequence modifications.

### Expression Elements

[0091] A polynucleotide encoding a gene may be functionally linked to a heterologous expression element, to facilitate transcription or regulation in a host cell. Such expression elements include but are not limited to: promoter, leader, intron, and terminator.

[0092] Expression of heterologous DNA sequences in a plant host is dependent upon the presence of operably linked promoters, including promoters, that are functional within the plant host. Choice of the promoter sequence will determine when and where within the organism the heterologous DNA sequence is expressed. Where expression in specific tissues or organs is desired, tissue-preferred promoters may be used. Where gene expression in response to a stimulus is desired, inducible promoters are the regulatory element of choice. In contrast, where continuous expression is desired throughout the cells of a plant, constitutive promoters are utilized. Additional regulatory sequences upstream and/or downstream from the core promoter sequence may be included in expression constructs of transformation vectors to bring about varying levels of expression of heterologous nucleotide sequences in a transgenic plant.

[0093] Frequently it is desirable to express a DNA sequence in particular tissues or organs of a plant. For example, use of tissue-preferred promoters operably linked to morphogenic genes that promote cell proliferation are useful for the efficient recovery of transgenic events during the transformation process. Such tissue-preferred promoters also have utility in expressing trait genes and/or pathogen-resistance proteins in the desired plant tissue to enhance plant yield and resistance to pathogens. Alternatively, it might be desirable to inhibit expression of a native DNA sequence within a plant's tissues to achieve a desired phenotype. In this case, such inhibition might be accomplished with transformation of the plant to comprise a tissue-preferred promoter operably linked to an antisense nucleotide sequence, such that expression of the antisense sequence produces an RNA transcript that interferes with translation of the mRNA of the native DNA sequence.

[0094] Additionally, it may be desirable to express a DNA sequence in plant tissues that are in a particular growth or developmental phase such as, for example, cell division or elongation. Such a DNA sequence may be used to promote or inhibit plant growth processes, thereby affecting the growth rate or architecture of the plant.

[0095] Expression elements may be “minimal”—meaning a shorter sequence derived from a native source, that still functions as an expression regulator or modifier. Alternatively, an expression element may be “optimized”—meaning that its polynucleotide sequence has been altered from its native state in order to function with a more desirable characteristic in a particular host cell (for example, but not limited to, a bacterial promoter may be “maize-optimized” to improve its expression in corn plants). Alternatively, an expression element may be “synthetic”—meaning that it is designed in silico and synthesized for use in a host cell. Synthetic expression elements may be entirely synthetic, or partially synthetic (comprising a fragment of a naturally-occurring polynucleotide sequence).

[0096] It has been shown that certain promoters are able to direct RNA synthesis at a higher rate than others. These are called “strong promoters”. Certain other promoters have been shown to direct RNA synthesis at higher levels only in particular types of cells or tissues and are often referred to as “tissue specific promoters”, or “tissue-preferred promoters” if the promoters direct RNA synthesis preferably in certain tissues but also in other tissues at reduced levels.

[0097] A plant promoter includes a promoter capable of initiating transcription in a plant cell. For a review of plant promoters, see, Potenza et al., 2004, In vitro Cell Dev Biol 40:1-22; Porto et al., 2014, Molecular Biotechnology (2014), 56(1), 38-49.

[0098] Constitutive promoters include, for example, the core CaMV 35S promoter (Odell et al., (1985) Nature 313:810-2); rice actin (McElroy et al., (1990) Plant Cell 2:163-71); ubiquitin (Christensen et al., (1989) Plant Mol Biol 12:619-32; ALS promoter (U.S. Pat. No. 5,659,026) and the like.

[0099] Tissue-preferred promoters can be utilized to target enhanced expression within a particular plant tissue. Tissue-preferred promoters include, for example, WO2013103367 published 11 Jul. 2013, Kawamata et al., (1997) Plant Cell Physiol 38:792-803; Hansen et al., (1997) Mol Gen Genet 254:337-43; Russell et al., (1997) Transgenic Res 6:157-68; Rinehart et al., (1996) Plant Physiol 112:1331-41; Van Camp et al., (1996) Plant Physiol 112:525-35; Canevascini et al., (1996) Plant Physiol 112:513-524; Lam, (1994) Results Probl Cell Differ 20:181-96; and Guevara-Garcia et al., (1993) Plant J 4:495-505. Leaf-preferred promoters include, for example, Yamamoto et al., (1997) Plant J 12:255-65; Kwon et al., (1994) Plant Physiol 105:357-67; Yamamoto et al., (1994) Plant Cell Physiol 35:773-8; Gotor et al., (1993) Plant J 3:509-18; Orozco et al., (1993) Plant Mol Biol 23:1129-38; Matsuoka et al., (1993) Proc. Natl. Acad. Sci. USA 90:9586-90; Simpson et al., (1958) EMBOJ4:2723-9; Timko et al., (1988) Nature 318:57-8. Root-preferred promoters include, for example, Hire et al., (1992) Plant Mol Biol 20:207-18 (soybean root-specific glutamine synthase gene); Miao et al., (1991) Plant Cell 3:11-22 (cytosolic glutamine synthase (GS)); Keller and Baumgartner, (1991) Plant Cell 3:1051-61 (root-specific control element in the GRP 1.8 gene of French bean); Sanger et al., (1990) Plant Mol Biol 14:433-43 (root-specific promoter of A. tumefaciens mannopine synthase (MAS)); Bogusz et al., (1990) Plant Cell 2:633-41 (root-specific promoters isolated from Parasponia andersonii and Trema tomentosa); Leach and Aoyagi, (1991) Plant Sci 79:69-76 (A. rhizogenes rolC and rolD root-inducing genes); Teeri et al., (1989) EMBOJ8:343-50 (Agrobacterium wound-induced TR1′ and TR2′ genes); VfENOD-GRP3 gene promoter (Kuster et al., (1995) Plant Mol Biol 29:759-72); and rolB promoter (Capana et al., (1994) Plant Mol Biol 25:681-91; phaseolin gene (Murai et al., (1983) Science 23:476-82; Sengopta-Gopalen et al., (1988) Proc. Natl. Acad. Sci. USA 82:3320-4). See also, U.S. Pat. Nos. 5,837,876; 5,750,386; 5,633,363; 5,459,252; 5,401,836; 5,110,732 and 5,023,179.

[0100] Seed-preferred promoters include both seed-specific promoters active during seed development, as well as seed-germinating promoters active during seed germination. See, Thompson et al., (1989) BioEssays 10:108. Seed-preferred promoters include, but are not limited to, Cim1 (cytokinin-induced message); cZ19B1 (maize 19 kDa zein); and milps (myo-inositol-1-phosphate synthase); and for example those disclosed in WO2000011177 published 2 Mar. 2000 and U.S. Pat. No. 6,225,529. For dicots, seed-preferred promoters include, but are not limited to, bean 0-phaseolin, napin, 0-conglycinin, soybean lectin, cruciferin, and the like. For monocots, seed-preferred promoters include, but are not limited to, maize 15 kDa zein, 22 kDa zein, 27 kDa gamma zein, waxy, shrunken 1, shrunken 2, globulin 1, oleosin, and nuc1. See also, WO2000012733 published 9 Mar. 2000, where seed-preferred promoters from END1 and END2 genes are disclosed.

[0101] Chemical inducible (regulated) promoters can be used to modulate the expression of a gene in a prokaryotic and eukaryotic cell or organism through the application of an exogenous chemical regulator. The promoter may be a chemical-inducible promoter, where application of the chemical induces gene expression, or a chemical-repressible promoter, where application of the chemical represses gene expression. Chemical-inducible promoters include, but are not limited to, the maize In2-2 promoter, activated by benzene sulfonamide herbicide safeners (De Veylder et al., (1997) Plant Cell Physiol 38:568-77), the maize GST promoter (GST-II-27, WO1993001294 published 21 Jan. 1993), activated by hydrophobic electrophilic compounds used as pre-emergent herbicides, and the tobacco PR-la promoter (Ono et al., (2004) Biosci Biotechnol Biochem 68:803-7) activated by salicylic acid. Other chemical-regulated promoters include steroid-responsive promoters (see, for example, the glucocorticoid-inducible promoter (Schena et al., (1991) Proc. Natl. Acad. Sci. USA 88:10421-5; McNellis et al., (1998) Plant J 14:247-257); tetracycline-inducible and tetracycline-repressible promoters (Gatz et al., (1991) Mol Gen Genet 227:229-37; U.S. Pat. Nos. 5,814,618 and 5,789,156).

[0102] Pathogen inducible promoters induced following infection by a pathogen include, but are not limited to those regulating expression of PR proteins, SAR proteins, beta-1,3-glucanase, chitinase, etc.

[0103] A stress-inducible promoter includes the RD29A promoter (Kasuga et al. (1999) Nature Biotechnol. 17:287-91). One of ordinary skill in the art is familiar with protocols for simulating stress conditions such as drought, osmotic stress, salt stress and temperature stress and for evaluating stress tolerance of plants that have been subjected to simulated or naturally-occurring stress conditions.

[0104] Another example of an inducible promoter useful in plant cells, is the ZmCAS1 promoter, described in US20130312137 published 21 Nov. 2013.

[0105] New promoters of various types useful in plant cells are constantly being discovered; numerous examples may be found in the compilation by Okamuro and Goldberg, (1989) In The Biochemistry of Plants, Vol. 115, Stumpf and Conn, eds (New York, NY:Academic Press), pp. 1-82.

### Cross-Talk Modulating Elements

[0106] In addition to promoters, other non-coding elements may regulate the expression of a gene. Such elements include insulators or “cross-talk blockers” (CTBs) that block enhancer-promoter interactions and/or serve as barriers against the spreading of the silencing effects of heterochromatin.

[0107] Examples of CTB elements include SEQ ID NO: 1-267, as well as functional fragments and variants thereof. In some aspects, a functional fragment or variant comprises at least one motif characteristic of a Type I or Type II CTB. Type I CTBs are capable of enhancer-blocking activity. Type II CTBs are capable of both enhancer-blocking and silence barrier activities.

[0108] In some aspects, the CTB comprises a motif described in Table 13.

[0109] In some aspects, the CTB shares at least at least 50%, between 50% and 55%, at least 55%, between 55% and 60%, at least 60%, between 60% and 65%, at least 65%, between 65% and 70%, at least 70%, between 70% and 75%, at least 75%, between 75% and 80%, at least 80%, between 80% and 85%, at least 85%, between 85% and 90%, at least 90%, between 90% and 95%, at least 95%, between 95% and 96%, at least 96%, between 96% and 97%, at least 97%, between 97% and 98%, at least 98%, between 98% and 99%, at least 99%, between 99% and 100%, or 100% sequence identity with at least 25, between 25 and 50, at least 50, between 50 and 75, at least 75, between 75 and 100, at least 100, or greater than 100 contiguous or non-contiguous nucleotides of a sequence selected from the group consisting of SEQ ID NO: 1-267.

### Transformation

[0110] The methods and compositions described herein do not depend on a particular method for introducing a sequence into an organism or cell, only that the polynucleotide or polypeptide gains access to the interior of at least one cell of the organism. Introducing includes reference to the incorporation of a nucleic acid into a eukaryotic or prokaryotic cell where the nucleic acid may be incorporated into the genome of the cell, and includes reference to the transient provision of a nucleic acid, as well as the stable transformation of a nucleic acid into a cell.

[0111] The methods of the invention involve introducing a nucleotide construct or a polypeptide into a plant. By “introducing” is intended presenting to the plant the nucleotide construct (i.e., DNA or RNA) or a polypeptide in such a manner that the nucleic acid or the polypeptide gains access to the interior of a cell of the plant. The methods of the invention do not depend on a particular method for introducing the nucleotide construct or the polypeptide to a plant, only that the nucleotide construct gains access to the interior of at least one cell of the plant. Methods for introducing nucleotide constructs and/or polypeptides into plants are known in the art including, but not limited to, stable transformation methods, transient transformation methods, virus-mediated methods, DNA integration recombinase systems.

[0112] By “stable transformation” is intended that the nucleotide construct introduced into a plant integrates into the genome of the plant and is capable of being inherited by progeny thereof. By “transient transformation” is intended that a nucleotide construct or the polypeptide introduced into a plant does not integrate into the genome of the plant.

[0113] In preparing a DNA cassette, various DNA fragments may be manipulated, so as to provide for the DNA sequences in the proper orientation and, as appropriate, in the proper reading frame. Toward this end, adapters or linkers may be employed to join the DNA fragments or other manipulations may be involved to provide for convenient restriction sites, removal of superfluous DNA, removal of restriction sites, or the like. For this purpose, in vitro mutagenesis, primer repair, restriction, annealing, resubstitutions, e.g., transitions and transversions, may be involved. The DNA cassettes may additionally contain 5′ leader sequences. Such leader sequences can act to enhance translation. Translation leaders are known in the art and include: picornavirus leaders, for example, EMCV leader (Encephalomyocarditis 5′ noncoding region) (Elroy-Stein et al. (1989) Proc. Natl. Acad. Sci. USA 86:6126-6130); potyvi-rus leaders, for example, TEV leader (Tobacco Etch Virus) (Gallie et al. (1995) Gene 165(2):233-238), MDMV leader (Maize Dwarf Mosaic Virus) (Virology 154:9-20), and human immunoglobulin heavy-chain binding protein (BiP) (Mace-jak et al. (1991) Nature 353:90-94); untranslated leader from the coat protein mRNA of alfalfa mosaic virus (AMV RNA 4) (Jobling et al. (1987) Nature 325:622-625); tobacco mosaic virus leader (TMV) (Gallie et al. (1989) in Molecular Biology of RNA, ed. Cech (Liss, New York), pp. 237-256); and maize chlorotic mottle virus leader (MCMV) (Lommel et al. (1991) Virology 81:382-385). See also, Della-Cioppa et al. (1987) Plant Physiol. 84:965-968. Other methods or sequences known to enhance translation can also be utilized, for example, introns, and the like.

[0114] The method of transformation is not critical to the invention; various methods of transformation are currently available. As newer methods are available to transform host cells they may be directly applied. Accordingly, a wide variety of methods have been developed to insert a DNA sequence into the genome of a host cell to obtain the transcription and/or translation of the sequence. Thus, any method that provides for efficient transformation/transfection may be employed.

[0115] Methods for introducing polynucleotides or polypeptides or a polynucleotide-protein complex into cells or organisms are known in the art including, but not limited to, microinjection, electroporation, stable transformation methods, transient transformation methods, ballistic particle acceleration (particle bombardment), whiskers mediated transformation, Agrobacterium-mediated transformation, direct gene transfer, viral-mediated introduction, transfection, transduction, cell-penetrating peptides, mesoporous silica nanoparticle (MSN)-mediated direct protein delivery, topical applications, sexual crossing, sexual breeding, and any combination thereof.

[0116] Plant cells differ from animal cells (such as human cells), fungal cells (such as yeast cells) and protoplasts, including for example plant cells comprise a plant cell wall which may act as a barrier to the delivery of components.

[0117] Protocols for introducing polynucleotides, polypeptides or polynucleotide-protein complexes into eukaryotic cells, such as plants or plant cells are known and include microinjection (Crossway et al., (1986) Biotechniques 4:320-34 and U.S. Pat. No. 6,300,543), meristem transformation (U.S. Pat. No. 5,736,369), electroporation (Riggs et al., (1986) Proc. Natl. Acad. Sci. USA 83:5602-6, Agrobacterium-mediated transformation (U.S. Pat. Nos. 5,563,055 and 5,981,840), whiskers mediated transformation (Ainley et al. 2013, Plant Biotechnology Journal 11:1126-1134; Shaheen A. and M. Arshad 2011 Properties and Applications of Silicon Carbide (2011), 345-358 Editor(s):Gerhardt, Rosario. Publisher:InTech, Rijeka, Croatia. CODEN:69PQBP; ISBN:978-953-307-201-2), direct gene transfer (Paszkowski et al., (1984) EMBO J 3:2717-22), and ballistic particle acceleration (U.S. Pat. Nos. 4,945,050; 5,879,918; 5,886,244; 5,932,782; Tomes et al., (1995) “Direct DNA Transfer into Intact Plant Cells via Microprojectile Bombardment” in Plant Cell, Tissue, and Organ Culture:Fundamental Methods, ed. Gamborg & Phillips (Springer-Verlag, Berlin); McCabe et al., (1988) Biotechnology 6:923-6; Weissinger et al., (1988) Ann Rev Genet 22:421-77; Sanford et al., (1987) Particulate Science and Technology 5:27-37 (onion); Christou et al., (1988) Plant Physiol 87:671-4 (soybean); Finer and McMullen, (1991) In vitro Cell Dev Biol 27P:175-82 (soybean); Singh et al., (1998) Theor Appl Genet 96:319-24 (soybean); Datta et al., (1990) Biotechnology 8:736-40 (rice); Klein et al., (1988) Proc. Natl. Acad. Sci. USA 85:4305-9 (maize); Klein et al., (1988) Biotechnology 6:559-63 (maize); U.S. Pat. Nos. 5,240,855; 5,322,783 and 5,324,646; Klein et al., (1988) Plant Physiol 91:440-4 (maize); Fromm et al., (1990) Biotechnology 8:833-9 (maize); Hooykaas-Van Slogteren et al., (1984) Nature 311:763-4; U.S. Pat. No. 5,736,369 (cereals); Bytebier et al., (1987) Proc. Natl. Acad. Sci. USA 84:5345-9 (Liliaceae); De Wet et al., (1985) in The Experimental Manipulation of Ovule Tissues, ed. Chapman et al., (Longman, New York), pp. 197-209 (pollen); Kaeppler et al., (1990) Plant Cell Rep 9:415-8) and Kaeppler et al., (1992) Theor Appl Genet 84:560-6 (whisker-mediated transformation); D'Halluin et al., (1992) Plant Cell 4:1495-505 (electroporation); Li et al., (1993) Plant Cell Rep 12:250-5; Christou and Ford (1995) Annals Botany 75:407-13 (rice) and Osjoda et al., (1996) Nat Biotechnol 14:745-50 (maize via Agrobacterium tumefaciens).

[0118] Alternatively, polynucleotides may be introduced into plant or plant cells by contacting cells or organisms with a virus or viral nucleic acids. Generally, such methods involve incorporating a polynucleotide within a viral DNA or RNA molecule. In some examples a polypeptide of interest may be initially synthesized as part of a viral polyprotein, which is later processed by proteolysis in vivo or in vitro to produce the desired recombinant protein. Methods for introducing polynucleotides into plants and expressing a protein encoded therein, involving viral DNA or RNA molecules, are known, see, for example, U.S. Pat. Nos. 5,889,191, 5,889,190, 5,866,785, 5,589,367 and 5,316,931.

[0119] The polynucleotide or recombinant DNA construct can be provided to or introduced into a prokaryotic and eukaryotic cell or organism using a variety of transient transformation methods. Such transient transformation methods include, but are not limited to, the introduction of the polynucleotide construct directly into the plant.

[0120] Nucleic acids and proteins can be provided to a cell by any method including methods using molecules to facilitate the uptake of anyone or all components of a guided Cas system (protein and/or nucleic acids), such as cell-penetrating peptides and nanocarriers. See also US20110035836 published 10 Feb. 2011, and EP2821486A1 published 7 Jan. 2015.

[0121] Methods for transforming various host cells are disclosed in Klein et al. “Transformation of microbes, plants and animals by particle bombardment”, Bio/Technol. New York, N.Y., Nature Publishing Company, March 1992, 10(3):286-291. Techniques for transforming a wide variety of higher plant species are well known and described in the technical, scientific, and patent literature. See, for example, Weising et al, Ann. Rev. Genet. 22:421-477 (1988).

[0122] For example, the DNA construct may be introduced directly into the genomic DNA of the plant cell using techniques such as electroporation, PEG-induced transfection, particle bombardment, silicon fiber delivery, or microinjection of plant cell protoplasts or embryogenic callus. See, e.g. Tomes et al. Direct DNA Transfer into Intact Plant Cells Via Microprojectile Bombardment, pp. 197-213 in Plant Cell, Tissue and Organ Culture, Fundamental Methods, eds. O. L. Gamborg and G. C. Phillips. Springer-Verlag Berlin Heidelberg N.Y, 1995. The introduction of DNA constructs using polyethylene glycol precipitation is described in Paszkowski et al, Embo J. 3:2717-2722 (1984). Electroporation techniques are described in Fromm et al. Proc. Natl. Acad. Sci. 82:5824 (1985). Ballistic transformation techniques are described in Klein et al. Nature 327:70-73 (1987).

[0123] Alternatively, the DNA constructs may be combined with suitable T-DNA flanking regions and introduced into a Agrobacterium tumefaciens host vector. The virulence functions of the Agrobacterium tumefaciens host will direct the insertion of the construct and adjacent marker into the plant cell DNA when the cell is infected by the bacteria. Agrobacterium tumefaciens-meditated transformation techniques are well described in the scientific literature. See, for example Horsch et al. Science 233:496-498 (1984), and Fraley et al. Proc. Natl. Acad. Sci. 80:4803 (1983). For instance, Agrobacterium transformation of maize is described in U.S. Pat. No. 5,981,840. Agrobacterium transformation of monocot is found in U.S. Pat. No. 5,591,616. Agrobacterium transformation of soybeans is described in U.S. Pat. No. 5,563,055.

[0124] Other methods of transformation include (1) Agrobacterium rhizogenes-induced transformation (see, e.g., Lichtenstein and Fuller In: Genetic Engineering, vol. 6, P W J Rigby, Ed, London, Academic Press, 1987; and Lichtenstein, C. P, and Draper, J, In: DNA Cloning, Vol. II, D. M. Glover, Ed, Oxford, IRI Press, 1985), Application PCT/US87/02512 (WO 88/02405 published Apr. 7, 1988) describes the use of A. rhizogenes strain A4 and its Ri plasmid along with A. tumefaciens vectors pARC8 or pARC16 (2) liposome-induced DNA uptake (see, e.g. Freeman et al. Plant Cell Physiol. 25:1353, 1984), (3) the vortexing method (see, e.g. Kindle, Proc. Natl. Acad. Sci, USA 87:1228, (1990).

[0125] DNA can also be introduced into plants by direct DNA transfer into pollen as described by Zhou et al. Methods in Enzymology 101:433 (1983); D. Hess, Intern Rev. Cytol. 107:367 (1987); Luo et al. Plant Mol. Biol. Reporter, 6:165 (1988). Expression of polypeptide coding nucleic acids can be obtained by injection of the DNA into reproductive organs of a plant as described by Pena et al. Nature 325:274 (1987). Transformation can also be achieved through electroporation of foreign DNA into sperm cells then microinjecting the transformed sperm cells into isolated embryo sacs as described in U.S. Pat. No. 6,300,543 by Cass et al. DNA can also be injected directly into the cells of immature embryos and the rehydration of desiccated embryos as described by Neuhaus et al, Theor. Appl. Genet. 75:30 (1987); and Benbrook et al, in Proceedings Bio Expo 1986, Butterworth, Stoneham, Mass, pp. 27-54 (1986).

[0126] Transformed plant cells which are derived by any of the above transformation techniques can be cultured to regenerate a whole plant which possesses the transformed genotype. Such regeneration techniques often rely on manipulation of certain phytohormones in a tissue culture growth medium, typically relying on a biocide and/or herbicide marker which has been introduced together with a polynucleotide of the present invention. For transformation and regeneration of maize see, Gordon-Kamm et al. The Plant Cell 2:603-618 (1990).

[0127] Other methods of introducing polynucleotides into a prokaryotic and eukaryotic cell or organism or plant part can be used, including plastid transformation methods, and the methods for introducing polynucleotides into tissues from seedlings or mature seeds.

### Cell Genome Modification

[0128] Compositions that have been introduced into a cell via transformation may be integrated into the genome of a cell, by any method known in the art, for example but not limited to: TALENs, CRISPR, Meganucleases, Recombinases, and the like.

[0129] Methods to modify or alter endogenous genomic DNA are known in the art. In some aspects, methods and compositions are provided for modifying naturally-occurring polynucleotides or integrated transgenic sequences, including regulatory elements, coding sequences, and non-coding sequences. These methods and compositions are also useful in targeting nucleic acids to pre-engineered target recognition sequences in the genome. Modification of polynucleotides may be accomplished, for example, by introducing single- or double-strand breaks into the DNA molecule.

[0130] Double-strand breaks induced by double-strand-break-inducing agents, such as endonucleases that cleave the phosphodiester bond within a polynucleotide chain, can result in the induction of DNA repair mechanisms, including the non-homologous end-joining pathway, and homologous recombination. Endonucleases include a range of different enzymes, including meganucleases (WO 2009/114321; Gao et al. (2010) Plant Journal 1:176-187), restriction endonucleases (see e.g. Roberts et al., (2003) Nucleic Acids Res 1:418-20), Roberts et al., (2003) Nucleic Acids Res 31:1805-12, and Belfort et al., (2002) in Mobile DNA II, pp. 761-783, Eds. Craigie et al., (ASM Press, Washington, DC)), meganucleases (see e.g., WO 2009/114321; Gao et al. (2010) Plant Journal 1:176-187), TAL effector nucleases or TALENs (see e.g., US20110145940, Christian, M., T. Cermak, et al. 2010. Targeting DNA double-strand breaks with TAL effector nucleases. Genetics 186(2): 757-61 and Boch et al., (2009), Science 326(5959): 1509-12), zinc finger nucleases (see e.g. Kim, Y. G., J. Cha, et al. (1996). “Hybrid restriction enzymes: zinc finger fusions to FokI cleavage”), and CRISPR-Cas endonucleases (see e.g. WO2007/025097 application published Mar. 1, 2007).

[0131] Once a double-strand break is induced in the genome, cellular DNA repair mechanisms are activated to repair the break. There are two DNA repair pathways. One is termed nonhomologous end-joining (NHEJ) pathway (Bleuyard et al., (2006) DNA Repair 5:1-12) and the other is homology-directed repair (HDR). The structural integrity of chromosomes is typically preserved by NHEJ, but deletions, insertions, or other rearrangements (such as chromosomal translocations) are possible (Siebert and Puchta, 2002, Plant Cell 14:1121-31; Pacher et al., 2007, Genetics 175:21-9. The HDR pathway is another cellular mechanism to repair double-stranded DNA breaks, and includes homologous recombination (HR) and single-strand annealing (SSA) (Lieber. 2010 Annu. Rev. Biochem. 79:181-211). A CRISPR-Cas system comprises, at a minimum, a CRISPR RNA (crRNA) molecule and at least one CRISPR-associated (Cas) protein to form crRNA ribonucleoprotein (crRNP) effector complexes.

[0132] CRISPR-Cas loci comprise an array of identical repeats interspersed with DNA-targeting spacers that encode the crRNA components and an operon-like unit of cas genes encoding the Cas protein components. The resulting ribonucleoprotein complex recognizes a polynucleotide in a sequence-specific manner (Jore et al., Nature Structural & Molecular Biology 18, 529-536 (2011)). The crRNA serves as a guide RNA for sequence specific binding of the effector (protein or complex) to double strand DNA sequences, by forming base pairs with the complementary DNA strand while displacing the noncomplementary strand to form a so called R-loop. (Jore et al., 2011. Nature Structural & Molecular Biology 18, 529-536).

[0133] Another example for genetically modifying the cell or plant described herein, is by using “custom” meganucleases produced to modify plant genomes (see e.g., WO 2009/114321; Gao et al. (2010) Plant Journal 1:176-187. The term “meganuclease” generally refers to a naturally-occurring homing endonuclease that binds double-stranded DNA at a recognition sequence that is greater than 12 base pairs and encompasses the corresponding intron insertion site. Naturally-occurring meganucleases can be monomeric (e.g., I-SceI) or dimeric (e.g., I-CreI). The term meganuclease, as used herein, can be used to refer to monomeric meganucleases, dimeric meganucleases, or to the monomers which associate to form a dimeric meganuclease.

[0134] TAL (transcription activator-like) effectors from plant pathogenic Xanthomonas are important virulence factors that act as transcriptional activators in the plant cell nucleus, where they directly bind to DNA via a central domain of tandem repeats. A transcription activator-like (TAL) effector-DNA modifying enzymes (TALE or TALEN) are also used to engineer genetic changes. See e.g., US20110145940, Boch et al., (2009), Science 326(5959): 1509-12. Fusions of TAL effectors to the FokI nuclease provide TALENs that bind and cleave DNA at specific locations. Target specificity is determined by developing customized amino acid repeats in the TAL effectors.

[0135] Once a double-strand break is induced in the genome, cellular DNA repair mechanisms are activated to repair the break. There are two DNA repair pathways. One is termed nonhomologous end-joining (NHEJ) pathway (Bleuyard et al., (2006) DNA Repair 5:1-12) and the other is homology-directed repair (HDR). The structural integrity of chromosomes is typically preserved by NHEJ, but deletions, insertions, or other rearrangements (such as chromosomal translocations) are possible (Siebert and Puchta, 2002, Plant Cell 14:1121-31; Pacher et al., 2007, Genetics 175:21-9. The HDR pathway is another cellular mechanism to repair double-stranded DNA breaks, and includes homologous recombination (HR) and single-strand annealing (SSA) (Lieber. 2010 Annu. Rev. Biochem. 79:181-211). HR pathways may be utilized for the insertion of a transgene or other heterologous element into the genome of the cell.

[0136] Integration of a heterologous polynucleotide into the genome of a cell may also be accomplished by the use of recombinases, for the insertion of “landing pads” int the genome of the cell. Examples of recombination sites for use in the invention are known in the art and include FRT sites (See, for example, U.S. Pat. No. 6,187,994; Schlake and Bode (1994) Biochemistry 33:12746-12751; Huang et al. (1991) Nucleic Acids Research 19:443-448; Paul D. Sadowski (1995) In Progress in Nucleic Acid Research and Molecular Biology 51:53-91; Michael M. Cox (1989) In Mobile DNA, Berg and Howe (eds) American Society of Microbiology, Washington D.C, pp. 116-670; Dixon et al. (1995) 18:449-458; Umlauf and Cox (1988) The EMBO Journal 7:1845-1852; Buchholz et al. (1996) Nucleic Acids Research 24:3118-3119; Kilby et al. (1993) Trends Genet. 9:413-421; Rossant and Geagy (1995) Nat. Med. 1:592-594; Albert et al. (1995) The Plant J. 7:649-659; Bayley et al. (1992) Plant Mol. Biol. 18:353-361; Odell etal. (1990) Mol. Gen. Genet. 223:369-378; and Dale and Ow (1991) Proc. Natl. Acad. Sci. USA 88:10558-105620; all of which are herein incorporated by reference); lox (Albert et al. (1995) Plant J. 7:649-659; Qui et al. (1994) Proc. Natl. Acad. Sci. USA 91:1706-1710; Stuurman et al. (1996) Plant Mol. Biol. 32:901-913; Odell et al. (1990) Mol. Gen. Gevet. 223: 369-378; Dale etal. (1990) Gene 91:79-85; and Bayley et al. (1992) Plant Mol. Biol. 18:353-361.) Dissimilar recombination sites are designed such that integrative recombination events are favored over the excision reaction. Such dissimilar recombination sites are known in the art. For example, Albert et al. introduced nucleotide changes into the left 13 bp element (LE mutant lox site) or the right 13 bp element (RE mutant lox site) of the lox site. Recombination between the LE mutant lox site and the RE mutant lox site produces the wild-type loxP site and a LE+RE mutant site that is poorly recognized by the recombinase Cre, resulting in a stable integration event (Albert etal. (1995) Plant J. 7:649-659). See also, for example, Araki et al. (1997) Nucleic Acid Research 25:868-872.

[0137] Using any of the methods known in the art, a heterologous polynucleotide may be integrated into the genome of a cell.

[0138] A variety of methods are available to identify those cells having an altered genome, with or without using a screenable marker phenotype. Such methods can be viewed as directly analyzing a target sequence to detect any change in the target sequence, including but not limited to PCR methods, sequencing methods, nuclease digestion, Southern blots, and any combination thereof.

### Cells and Plants

[0139] The presently disclosed polynucleotides and polypeptides can be introduced into a cell. Cells include, but are not limited to, human, non-human, animal, mammalian, bacterial, fungal, insect, yeast, non-conventional yeast, and plant cells as well as plants and seeds produced by the methods described herein. Any plant can be used with the compositions and methods described herein, including monocot and dicot plants, and plant elements.

[0140] Examples of monocot plants that can be used include, but are not limited to: corn (Zea mays), rice (Oryza sativa), rye (Secale cereale), sorghum (Sorghum bicolor, Sorghum vulgare), millet (e.g., pearl millet (Pennisetum glaucum), proso millet (Panicum miliaceum), foxtail millet (Setaria italica), finger millet (Eleusine coracana)), teff (Eragrostis species), wheat (Triticum species, for example Triticum aestivum, Triticum monococcum), sugarcane (Saccharum spp.), oats (Avena), barley (Hordeum), switchgrass (Panicum virgatum), pineapple (Ananas comosus), banana (Musa spp.), palm, ornamentals, turfgrasses, and other grasses.

[0141] Examples of dicot plants that can be used include, but are not limited to: soybean (Glycine max), Brassica species (for example but not limited to: oilseed rape or Canola) (Brassica napus, Brassica campestris, Brassica rapa, Brassica juncea), alfalfa (Medicago sativa), tobacco (Nicotiana tabacum), Arabidopsis (Arabidopsis thaliana), sunflower (Helianthus annuus), cotton (Gossypium arboreum, Gossypium barbadense, Gossypium hirsutum), and peanut (Arachis hypogaea), tomato (Solanum lycopersicum), potato (Solanum tuberosum.

[0142] Additional plants that can be used include safflower (Carthamus tinctorius), sweet potato (Ipomoea batatus), cassava (Manihot esculenta), coffee (Coffea spp.), coconut (Cocos nucifera), citrus trees (Citrus spp.), cocoa (Theobroma cacao), tea (Camellia sinensis), banana (Musa spp.), avocado (Persea americana), fig (Ficus casica), guava (Psidium guajava), mango (Mangifera indica), olive (Olea europaea), papaya (Caricapapaya), cashew (Anacardium occidentale), macadamia (Macadamia integrifolia), almond (Prunus amygdalus), sugar beets (Beta vulgaris), vegetables, ornamentals, and conifers.

[0143] Vegetables that can be used include tomatoes (Lycopersicon esculentum), lettuce (e.g., Lactuca sativa), green beans (Phaseolus vulgaris), lima beans (Phaseolus limensis), peas (Lathyrus spp.), and members of the genus Cucumis such as cucumber (C. sativus), cantaloupe (C. cantalupensis), and musk melon (C. melo). Ornamentals include azalea (Rhododendron spp.), hydrangea (Macrophylla hydrangea), hibiscus (Hibiscus rosasanensis), roses (Rosa spp.), tulips (Tulipa spp.), daffodils (Narcissus spp.), petunias (Petunia hybrida), carnation (Dianthus caryophyllus), poinsettia (Euphorbia pulcherrima), and chrysanthemum.

[0144] Conifers that may be used include pines such as loblolly pine (Pinus taeda), slash pine (Pinus elliotii), ponderosa pine (Pinus ponderosa), lodgepole pine (Pinus contorta), and Monterey pine (Pinus radiata); Douglas fir (Pseudotsuga menziesii); Western hemlock (Tsuga canadensis); Sitka spruce (Picea glauca); redwood (Sequoia sempervirens); true first such as silver fir (Abies amabilis) and balsam fir (Abies balsamea); and cedars such as Western red cedar (Thuja plicata) and Alaska yellow cedar (Chamaecyparis nootkatensis).

[0145] In certain embodiments of the disclosure, a fertile plant is a plant that produces viable male and female gametes and is self-fertile. Such a self-fertile plant can produce a progeny plant without the contribution from any other plant of a gamete and the genetic material comprised therein. Other embodiments of the disclosure can involve the use of a plant that is not self-fertile because the plant does not produce male gametes, or female gametes, or both, that are viable or otherwise capable of fertilization.

[0146] The present disclosure finds use in the breeding of plants comprising one or more introduced traits, or edited genomes.

[0147] A non-limiting example of how two traits can be stacked into the genome at a genetic distance of, for example, 5 cM from each other is described as follows: A first plant comprising a first transgenic target site integrated into a first DSB target site within the genomic window and not having the first genomic locus of interest is crossed to a second transgenic plant, comprising a genomic locus of interest at a different genomic insertion site within the genomic window and the second plant does not comprise the first transgenic target site. About 5% of the plant progeny from this cross will have both the first transgenic target site integrated into a first DSB target site and the first genomic locus of interest integrated at different genomic insertion sites within the genomic window. Progeny plants having both sites in the defined genomic window can be further crossed with a third transgenic plant comprising a second transgenic target site integrated into a second DSB target site and/or a second genomic locus of interest within the defined genomic window and lacking the first transgenic target site and the first genomic locus of interest. Progeny are then selected having the first transgenic target site, the first genomic locus of interest and the second genomic locus of interest integrated at different genomic insertion sites within the genomic window. Such methods can be used to produce a transgenic plant comprising a complex trait locus having at least 1, 2, 3, 4, 5, 6, 7, 8, 9, 10, 11, 12, 13, 14, 15, 16, 17, 19, 19, 20, 21, 22, 23, 24, 25, 26, 27, 28, 29, 30, 31 or more transgenic target sites integrated into DSB target sites and/or genomic loci of interest integrated at different sites within the genomic window. In such a manner, various complex trait loci can be generated.

[0148] While the invention has been particularly shown and described with reference to a preferred embodiment and various alternate embodiments, it will be understood by persons skilled in the relevant art that various changes in form and details can be made therein without departing from the spirit and scope of the invention. For instance, while the particular examples below may illustrate the methods and embodiments described herein using a specific plant, the principles in these examples may be applied to any plant. All cited patents and publications referred to in this application are herein incorporated by reference in their entirety, for all purposes, to the same extent as if each were individually and specifically incorporated by reference.

### EXAMPLES

[0149] The following are examples of specific embodiments of some aspects of the invention.

[0150] The examples are offered for illustrative purposes only, and are not intended to limit the scope of the invention in any way. Efforts have been made to ensure accuracy with respect to numbers used (e.g., amounts, temperatures, etc.), but some experimental error and deviation should, of course, be allowed for.

[0151] A wide range of tissue or explant types can be used in the current method, including suspension cultures, protoplasts, immature embryos, mature embryos, immature cotyledons, mature cotyledons, split seed, embryonic axes, hypocotyls, epicotyls and leaves. Methods and compositions for the transformation and regeneration of crop plants, such as but not limited to maize, soybean, wheat, alfalfa, canola, rice, sugarcane, cotton, and others are known in the art. Standard protocols for various methods for introducing components into plant cells include, but are not limited to, methods for particle bombardment (Finer and McMullen, 1991, In Vitro Cell Dev. Biol.-Plant 27:175-182), Agrobacterium-mediated transformation (Jia et al., 2015, Int J. Mol. Sci. 16:18552-18543; US20170121722), or Ochrobactrum-mediated transformation (US20180216123) for soybean, or methods for corn such as described in WO2017074547A1, can be used with the methods of the disclosure. These methods are listed as non-limiting examples.

[0152] Additional compositions, such as morphogenic factors (e.g., developmental genes, such as Babyboom and/or Wuschel) may improve the frequency of transformation. See, for example, US20170121722A1 published 4 May 2017. Other compositions, such as regulatory expression elements, may be selected for various attributes, such as but not limited to, temporal or spatial regulation of gene expression.

### Example 1: Identification of Insulator Sequences

[0153] Different searching strategies were designed to computationally identify two different types of insulators based on the expected attributes of enhancer blocking only (for type I insulator) and combination of enhancer blocking and silence barrier (for type II insulator), as described in Table 1.

TABLE 1
Type I and Type II insulators with associated attributes

Insulator Types

| Insulating effect | I | II |
|---|---|---|
| Enhancer blocking | √ | √ |
| Silence barrier | | √ |

[0154] The target genes for insulator I were selected based on the adjacent gene expression patterns (i.e. low and high expression levels between genes in pair). The open chromatin sequences interacted with these genes were used for motif enrichment. Motifs were mapped back to the targeted anchor sequences for motif cluster identification. These sequences were then used for the motif enrichment procedure for type I insulator discovery and validation. For insulator II, the targeted genes were identified by the expected stable expression pattern across different tissue types. The rest of the procedures were similar with insulator I process.

[0155] An insulator, or cross-talk blocker, was defined as a DNA sequence of variable length (˜20 bp-2 kb) which fell in any of the following category including: a cis element, a chromatin association element (stem-loop forming sequence), silencing barrier, enhancer blockers, an insulator, or any combination thereof. When introduced, these elements potentially block cross-talk between genes on a T-DNA, either tandemly arranged as two independent DNA expression cassettes (FIG. 1A) or are placed distantly (FIG. 1B) or in the physical context of chromosomal gene. These blocker elements can be placed in the 5′, 3′ or combined ends of the protected DNA expression units.

### Example 2: Expression Assay of Reporter Gene in Maize Protoplasts

[0156] Transfection vectors were built with two expression cassettes. One cassette was used for normalization to eliminate the effects of plasmid copy number variations in the protoplast population. The second cassette was used for evaluating the expression effects of each insulator candidate.

[0157] The normalization cassette (example depicted in FIG. 2) comprised a strong constitutive regulatory element (Seteria italica ubiquitin promoter and first intron) driving TagRFP with a PINII terminator (Solanum tuberosum invertase). The experimental cassette comprised the CAMV35S promoter divided into a 49 bp minimal promoter and a 433 bp upstream enhancer. The division was made at a position 16 upstream of the TATA sequence. This promoter was paired with the Omega prime 5′ untranslated region from the Tobacco Mosaic Virus. Together, these elements drove ZsGreen1 as the reporter gene with the Sorghum bicolor gamma kafarin terminator.

[0158] Insulator candidates were cloned between the CAMV35S enhancer and minimal promoter. Insulation was observed as decreased levels of fluorescence from ZS-Green1. The negative control (no insulation) was a vector with no insulator separating the CAMV35S enhancer and minimal promoter. The positive control (max insulation) was a vector with only the minimal promoter (e.g. no CAMV35S enhancer). The CAMV35S minimal promoter produced no ZS-Green1 fluorescence in the absence an enhancer.

[0159] Vectors were tested in maize leaf protoplasts using a modified version of a commonly used protocol to facilitate the delivery of known plasmid DNA to cells isolated from maize inbred leaf mesophyll cells. Transfection was achieved using 40% (w/v) polyethelene glycol for 15 minutes.

[0160] The quantification of fluorescence was performed using a Cytation5 inverted microscope imager (Biotek). Images were taken at 4× of the transfected protoplast populations using excitation and emission spectra based on the fluorescent markers. Post-imaging processing was carried using the BioTek Gen5 software. Using a circularity, size, and presence of TagRFP fluorescence algorithm, positively transfected cells were identified and the relative fluorescence, based on pixel intensity, was recorded. The fluorescence recorded from the GFP channel was normalized to the RFP in order to quantify on a cell by cell basis. The geometric mean was calculated for each experimental entity and compared to the appropriate control with 95% confidence intervals.

[0161] Results from the protoplast pilot study are depicted in FIG. 8.

### Example 3: Testing of Cross-Talk Blockers for Agrobacterium-Mediated Immature Embryo Site-Specific Integration (SSI)

[0162] Arabidopsis CTB elements previously described in U.S. Pat. No. 7,655,786 B2 were selected. Three of the DNA fragments, 5-III-1, 5-IV-2, and 5-IV-7, were selected for testing for immature embryo marker-free SSI. DNA expression cassettes containing the above elements were designed and placed on the 3′ and/or 5′ end the cassette. A schematic design of the vector is provided in FIG. 3. The T-DNA vector is comprised of the following components: right border, the rice actin promoter, rice actin intron, driving expression of a maize WUS2 coding sequence and maize IN2-1 terminator; maize ubiquitin promoter, 5′UTR, ubiquitin intron driving the expression of a maize ODP2 coding sequence and maize OST28 terminator; maize ubiquitin promoter, 5′UTR, ubiquitin intron driving the expression of a maize optimized FLP EXON1, ST-LS 1 INTRON2 followed by maize optimized FLP EXON1 coding sequence and rice ubiquitin terminator. A DNA with the recombination site FRT1 flanking a promoter-less pmi gene encoding the phosphomannose isomerase conferring resistance to mannose with maize ubiquitin terminator. A heat shock promoter HSP17.7 driving the expression of maize optimized Cre EXON1, ST-LS 1 INTRON2 followed by a Cre EXON2 coding sequence and Sorghum bicolor C18 terminator. A trait gene cassette with viral enhancers fused to a promoter driving the expression of any trait gene followed by the recombination site FRT6. The CTB elements are placed either 3′ end of the HSP:Cre expression cassette and/or at both at 3′ and 5′ of the Cre expression cassette to insulate the HSP promoter from promoter-enhancer activation or transcriptional interference. As a consequence of the insulation, higher rates of SSI events which are free of the marker gene and HSP:CRE cassette were recovered at TO level.

[0163] The T-DNA was transformed into Agrobacterium strain LBA4404 TD Thy- and used for transforming immature embryos derived transgenic plants with recombinant target line (RTL) containing the heterologous recombination sites FRT/16 or FRT1/87. The different steps in transformation, event selection and molecular analysis of SSI events is disclosed in US20170240911A1. The events which were free of marker-gene, Cre, morphogenic genes (WUS2 and ODP2) and FLP, but have an intact copy of the trait gene and FRT6 site inserted in RTL were identified as clean SSI events. This method allowed to improve the frequency of SSI events compared to constructs without the CTB sequence for insulation. A similar vector design without the donor template is used for mitigating promoter-enhancer and transcriptional interference in random immature embryo transformation and for expressing morphogenic genes.

### Example 4: CTB Identification from Arabidopsis Activation-Tagged Lines

[0164] Activation-tagged lines in Arabidopsis (Weigel et al 2000) are T-DNA insertion lines with 4 copies of the Cauliflower Mosaic Virus (CaMV) 35S enhancer situated at the right border of the T-DNA. The insertion of the T-DNA in the genome can have several effects. Insertion of the T-DNA into a gene or its regulatory element could disrupt the expression of the gene, while insertion of the T-DNA in intergenic regions could trigger the expression of flanking or neighboring genes as a result of transactivation by the CaMV35S enhancers. In other cases, the T-DNA may be inserted within a gene disrupting it while neighboring genes may show increased expression due to transactivation.

[0165] Neighboring genes that do not show upregulation may contain insulator-like elements in the upstream regions of the genes that interfere with transactivation. In an attempt to identify such elements, transcript levels of genes flanking T-DNA insertions in three activation-tagged lines, hat1, hat4, and hat7 were assessed.

[0166] In hat1, the T-DNA was inserted in At4g15290, a Cellulose synthase-like gene (CSL). The gene downstream of CSL, At4g15280, a UDP-glucosyl transferase (UGT), was strongly upregulated in the mutant hat1 compared to the wild-type plant. The gene upstream of CSL, At4g15300, a Cytochrome P450 (CYP), did not show any change in expression levels in hat1 compared to the wild-type plant. A 2-kb sequence upstream of the 1-kb promoter of CYP was selected as a region that contained the putative insulator-like element(s). The region was sub-divided into four sections of 500 bp each and named INS1, INS2, INS3 and INS4, respectively. Similarly, a 2-kb sequence upstream of the 1-kb promoter of UGT was identified as a region that would not contain any insulator-like elements and sub-divided into four 500 bp sequences named as INS5, INS6, INS7, and INS8, respectively.

[0167] Two independent mutant lines, hat4 and hat7, had the T-DNA insertion in the intergenic region between At1g60140, a Trehalose synthase-like gene (TSL) and At1g60160, a Potassium transporter family gene (PTF). Transcript analysis revealed upregulation of PTF, while TSL expression levels did not change in the mutants compared to the wild-type plants. A 2-kb sequence upstream of the 1-kb promoter of TSL was selected as a region that contained the putative insulator-like element(s). The region was sub-divided into four sections of 500 bp each and named INS9, INS10, INS 11 and INS12, respectively.

[0168] Each of the putative insulator-like sequences were cloned into the SpeI restriction site of a Gateway entry vector comprising of a CaMV35S enhancer upstream of a LTP2 promoter driving DS-RED, terminated with a CaMV 35S terminator. Cloning the putative insulator-like sequence in the SpeI site resulted in the CaMV35S enhancer and the LTP2 promoter now being separated from each other by the sequence. This entry vector was cloned into a destination vector using LR clonase, along with entry vectors carrying a ZM-PLTP::ZM-WUS2 cassette and a ZM-PLTP::ZM-ODP2 cassette to create an expression vector for transformation of maize immature embryos.

[0169] An example of a test vector is depicted in FIG. 4. Results from testing 19 unique CTB sequences are presented in FIG. 9.

### Example 5: Testing CTB-Like Candidates in Agrobacterium-Mediated Transformation of Maize Immature Embryos

[0170] Maize immature embryos were transformed with Agrobacterium harboring expression vectors (FIG. 4) carrying different CTB candidate sequences, in addition to control sequences of 500 bp length such as the Lotus japonicus Ubiquitin Terminator (INS16), or an expression vector without the CTB-like sequence (INS17). Two days after infection the immature embryos were transferred to resting medium for a week. Somatic embryos formed were observed under the fluorescence microscope for green and red fluorescence and photographed. Immature embryos, transformed with an expression vector with an insulator-like sequence, showing somatic embryos fluorescing green but not red were considered potential candidates with insulator-like activity, whereas constructs that fluoresced both green and red were considered negative for CTB-like activity.

[0171] Table 2 shows the results of testing CTB-like candidates in maize immature embryos. CTB activity resulted in absence of red fluorescence whereas no CTB activity resulted in the presence of red fluorescence. Green fluorescence being part of the CTB T-DNA used for transformation of maize immature embryos was present in all the tested samples.

TABLE 2

| | Green | Red | |
|---|---|---|---|
| CTB | Fluorescence | Flourescence | Result |
| INS1 | + | − | CTB activity |
| INS2 | + | − | CTB activity |
| INS3 | + | + | No CTB activity |
| INS4 | + | − | CTB activity |
| INS5 | + | + | No CTB activity |
| INS6 | + | − | CTB activity |
| INS8 | + | + | No CTB activity |
| INS9 | + | − | CTB activity |
| INS10 | + | + | No CTB activity |
| INS11 | + | + | No CTB activity |
| INS16 (Non- | + | + | No CTB activity |
| insulator DNA) | | | |
| INS17 (No | + | + | No CTB activity |
| Insulator) | | | |

[0172] As shown in Table 2, INS1, INS2, INS4, INS6, INS9 showed insulator-like activity as indicated by the absence of the DS-RED fluorescence. The non-insulator control sequence INS16 and the expression vector without the CTB-like sequence (INS17) did not show insulator-like activity.

### Example 6: Testing CTB Candidates in Agrobacterium-Mediated Transformation of Maize Leaf Explants

[0173] Maize leaf explants were transformed with Agrobacterium containing expression vectors with different CTB sequences. Two construct configurations were used.

[0174] Construct Configuration A: RB+LOXP+AT-5-IV-2 INS+ZM-HSP17.7 PRO::MO-CRE::PINII TERM+CTB+NOS PRO::ZM-WUS2::IN2 TERM+3×ENH-UBI1 PRO::ZM-ODP2::OS-T28 TERM+LOXP+SB-UBI PRO::ZSGREEN1::OS-UBI TERM+SB-ALS PRO::ZM-ALS::SB-UBI TERM+LB, where different test CTB sequences replaced “CTB”. The plasmids used and the transformation results obtained are summarized in Table 3.

TABLE 3

| | | # of | # of T0 | % T0 |
|---|---|---|---|---|
| Plasmid | CTB | Seedlings | plants | plants |
| PHP96034 | AT-5-IV-2 | 23 | 0 | 0 |
| (SEQ ID NO: 145) | INS (Control) | | | |
| PHP101513 | ZM-T1S1C1 | 23 | 1 | 4 |
| (SEQ ID NO: 146) | | | | |
| PHP101514 | ZM-T1S2C3 | 23 | 3 | 13 |
| (SEQ ID NO: 147) | | | | |
| PHP101652 | ZM-T1S2C8 | 23 | 5 | 22 |
| (SEQ ID NO: 148) | | | | |
| PHP101653 | ZM-T1S2C9 | 24 | 4 | 17 |
| (SEQ ID NO: 149) | | | | |
| PHP101654 | ZM-T2S2C9 | 24 | 3 | 13 |
| (SEQ ID NO: 150) | | | | |

[0175] When PHP96034 (SEQ TD NO: 145) was used for transformation, no TO plants were recovered. However, with the use of sequences ZM-T1S1C1, ZM-T15S2C3, ZM-T15S2C8, ZM-T1S2C9, and ZM-T252C9 as CTBs upstream of the NOS:WUS cassette, TO plants were recovered ranging from a frequency of 4-22%.

[0176] Construct Configuration B: RB+LOXP+NOS PRO::ZM-WUS2::N2 TERM+3×ENH-UBJ1 PRO::ZM-ODP2::OS-T28 TERM+CTB+ZM-HSP17.7 PRO::MO-CRE::PINII TERM+LOXP+SB-UBI PRO::ZSGREEN1::OS-UBI TERM+SB-ALS PRO::ZM-ALS::SB-UBI TERM+LB, where different test CTB sequences replaced “CTB”. The plasmids used and the transformation results obtained are summarized in Table 4. Data are collected from 3 replicated experiments and represented as Mean 00 TO plants±Standard Error.

TABLE 4

| Plasmid | CTB | % T0 plants |
|---|---|---|
| PHP97883 | No CTB | 193 ± 24 |
| (SEQ ID NO: 151) | | |
| PHP96037 | AT-5-IV-2 INS | 375 ± 80 |
| (SEQ ID NO: 152) | | |
| PHP101595 | AT-4G15300-I INS | 580 ± 0 |
| (SEQ ID NO: 153) | | |
| PHP101271 | AT-4G15300-II INS | 277 ± 59 |
| (SEQ ID NO: 154) | | |
| PHP101811 | AT-4G15300-IV INS | 540 ± 0 |
| (SEQ ID NO: 155) | | |
| PHP101272 | AT-4G15280-II INS | 320 ± 50 |
| (SEQ ID NO: 156) | | |
| PHP101596 | AT-1G60140-I INS | 255 ± 15 |
| (SEQ ID NO: 157) | | |
| PHP101512 | AT-4G15290-I INS | 430 ± 90 |
| (SEQ ID NO: 158) | | |
| PHP101597 | AT-4G15290-IV INS | 265 ± 5 |
| (SEQ ID NO: 159) | | |
| PHP101308 | ZM-T2S2C8 CTB | 288 ± 40 |
| (SEQ ID NO: 160) | | |
| PHP101206 | ZM-T2S2C2-4 CTB | 379 ± 79 |
| (SEQ ID NO: 161) | | |
| PHP101207 | ZM-T2S2C5 CTB | 422 ± 65 |
| (SEQ ID NO: 162) | | |
| PHP101205 | ZM-T1S2C9-2 CTB | 215 ± 54 |
| (SEQ ID NO: 163) | | |
| PHP 101094 | ZM-T1S6C6 CTB | 242 ± 34 |
| (SEQ ID NO: 164) | | |

[0177] In the absence of a CTB sequence between the 3×ENH-UBI:ODP2 cassette and the immediately downstream HSP17.7:CRE cassette of the construct PUP97883 (SEQ ID NO: 151) transformation frequency was 193%. With the inclusion of CTB sequences AT-5-IV-2 INS, AT-4G15300-I INS, AT-4G15300-II INS, AT-4G15300-IV INS, AT-4G15280-II INS, AT-1G60140-I INS, AT-4G15290-I INS, AT-4G15290-IV INS, ZM-T1S2C9-2 CTB, ZM-T1S6C6 CTB, ZM-T2S2C8 CTB, ZM-T2S2C2-4 CTB, or ZM-T2S2C5 CTB, transformation frequency increased ranging from 215-580%.

[0178] Two additional construct configurations are used.

[0179] Construct configuration C: RB+LOXP+NOS PRO::ZM-WUS2::IN2 TERM+CTB+3×ENH-UBI1 PRO::ZM-ODP2::OS-T28 TERM+CTB+ZM-HSP17.7 PRO::MO-CRE::PINII TERM+LOXP+SB-UBI PRO::ZSGREEN1::OS-UBI TERM+SB-ALS PRO::ZM-ALS::SB-UBI TERM+LB, where different test CTB sequences replace “CTB”. CTB sequences are expected to stabilize the expression of gene cassettes surrounding the CTB.

[0180] Construct configuration D: RB+LOXP+CTB+NOS PRO::ZM-WUS2::IN2 TERM+3×ENH-UBI1 PRO::ZM-ODP2::OS-T28 TERM+CTB+ZM-HSP17.7 PRO::MO-CRE::PINII TERM+LOXP+SB-UBI PRO::ZSGREEN1::OS-UBI TERM+SB-ALS PRO::ZM-ALS::SB-UBI TERM+LB, where different test CTB sequences replace “CTB”. CTB sequences are expected to stabilize the expression of gene cassettes surrounding the CTB.

### Example 7: Effect of CTB's on Expression in a Gene Stack Configuration

[0181] CTB sequences were tested for properties that prevent the down-regulation of one or both genes in a gene stack vector configuration consisting of two tandemly oriented expression cassettes (FIG. 17). Expression of the upstream cassette in the vector creates a situation that can result in a negative effect on the expression of the downstream cassette. Negative effects on the expression of the upstream cassette can also occur in these vectors. These impacts are apparent when expression is compared to control constructs where each cassette is expressed in separate vectors.

[0182] To determine if a CTB sequence had a positive effect on the expression of one or both cassettes in a stacked vector configuration, each CTB sequence was cloned between the expression cassettes and expressed in maize in a first pass analysis. Results are shown in Table 5.

TABLE 5

| CTB | First cassette | Second cassette |
|---|---|---|
| No CTB | 4 | 1 |
| ZM-T1S1C1 | 8 | 6 |
| (SEQ ID NO: 1) | | |
| ZM-T1S1C5 | 0 | 1 |
| (SEQ ID NO: 30) | | |
| ZM-T1S2C1 | 6 | 4 |
| (SEQ ID NO: 9) | | |
| ZM-T1S2C3 | 6 | 6 |
| (SEQ ID NO: 2) | | |
| ZM-T1S2C3-2 | 2 | 2 |
| (SEQ ID NO: 3) | | |
| ZM-T1S2C6 | 3 | 2 |
| (SEQ ID NO: 4) | | |
| ZM-T1S2C7 | 6 | 4 |
| (SEQ ID NO: 5) | | |
| ZM-T1S2C8 | 6 | 6 |
| (SEQ ID NO: 6) | | |
| ZM-T1S2C9 | 6 | 9 |
| (SEQ ID NO: 7) | | |
| ZM-T1S2C9-2 | 4 | 3 |
| (SEQ ID NO: 8) | | |
| ZM-T1S6C1 | 8 | 4 |
| (SEQ ID NO: 11) | | |
| ZM-T1S6C5 | 3 | 3 |
| (SEQ ID NO: 31) | | |
| ZM-T1S6C5-2 | 5 | 3 |
| (SEQ ID NO: 32) | | |
| ZM-T1S6C6 | 3 | 3 |
| (SEQ ID NO: 10) | | |
| ZM-T2S1C1 | 4 | 2 |
| (SEQ ID NO: 12) | | |
| ZM-T2S1C3 | 4 | 4 |
| (SEQ ID NO: 13) | | |
| ZM-T2S1C4 | 5 | 3 |
| (SEQ ID NO: 14) | | |
| ZM-T2S1C5 | 4 | 3 |
| (SEQ ID NO: 15) | | |
| ZM-T2S1C5-2 | 2 | 1 |
| (SEQ ID NO: 32) | | |
| ZM-T2S1C5-3 | 3 | 1 |
| (SEQ ID NO: 33) | | |
| ZM-T2S2C2 | 6 | 6 |
| (SEQ ID NO: 20) | | |
| ZM-T2S2C2-2 | 4 | 1 |
| (SEQ ID NO: 22) | | |
| ZM-T2S2C2-3 | 1 | 2 |
| (SEQ ID NO: 23) | | |
| ZM-T2S2C2-4 | 2 | 3 |
| (SEQ ID NO: 24) | | |
| ZM-T2S2C3 | 1 | 3 |
| (SEQ ID NO: 21) | | |
| ZM-T2S2C4 | 5 | 4 |
| (SEQ ID NO: 18) | | |
| ZM-T2S2C4-2 | 2 | 3 |
| (SEQ ID NO: 19) | | |
| ZM-T2S2C5 | 2 | 2 |
| (SEQ ID NO: 26) | | |
| ZM-T2S2C5-2 | 1 | 0 |
| (SEQ ID NO: 27) | | |
| ZM-T2S2C5-3 | 4 | 7 |
| (SEQ ID NO: 28) | | |
| ZM-T2S2C5-4 | 3 | 0 |
| (SEQ ID NO: 29) | | |
| ZM-T2S2C5-5 | 9 | 9 |
| (SEQ ID NO: 35) | | |
| ZM-T2S2C7 | 5 | 4 |
| (SEQ ID NO: 25) | | |
| ZM-T2S2C8 | 5 | 4 |
| (SEQ ID NO: 16) | | |
| ZM-T2S2C9 | 5 | 6 |
| (SEQ ID NO: 17) | | |

0-9 scale based on the raw data first being normalized to the respective single gene control, then ranked based on the highest and lowest values.
0 = expression is 40%-50% of the single gene control
9 = expression is >130% of the single gene control

[0183] A subset of the CTB's were advanced for additional analysis in stably transformed corn plants. Results in V6 leaf tissue are shown in Table 6 and for R1 stalk in Table 7.

TABLE 6

| CTB | First Cassette (leaf) | Second Cassette (leaf) |
|---|---|---|
| empty | 5 | 9 |
| ZM-T1S1C1 | 5 | 5 |
| (SEQ ID NO: 1) | | |
| ZM-T1S2C3 | 2 | 3 |
| (SEQ ID NO: 2) | | |
| ZM-T1S2C3-2 | 3 | 3 |
| (SEQ ID NO: 3) | | |
| ZM-T1S2C8 | 2 | 3 |
| (SEQ ID NO: 6) | | |
| ZM-T1S2C9 | 4 | 4 |
| (SEQ ID NO: 7) | | |
| ZM-T2S1C5 | 1 | 1 |
| (SEQ ID NO: 15) | | |
| ZM-T2S2C9 | 1 | 2 |
| (SEQ ID NO: 17) | | |

0-9 scale based on the raw data first being normalized to the respective single gene control, then ranked based on the highest and lowest values.
0 = expression is 40%-50% of the single gene control
1 = expression is 50%-60% of the single gene control
2 = expression is 60%-70% of the single gene control
3 = expression is 70%-80% of the single gene control
4 = expression is 80%-90% of the single gene control
5 = expression is 90%-100% of the single gene control
6 = expression is 100%-110% of the single gene control
7 = expression is 110%-120% of the single gene control
8 = expression is 120%-130% of the single gene control
9 = expression is >130% of the single gene control

TABLE 7

| CTB | First Cassette (stalk) | Second Cassette (stalk) |
|---|---|---|
| empty | 2 | 5 |
| ZM-T1S1C1 | 4 | 5 |
| (SEQ ID NO: 1) | | |
| ZM-T1S2C3 | 4 | 5 |
| (SEQ ID NO: 2) | | |
| ZM-T1S2C3-2 | 3 | 4 |
| (SEQ ID NO: 3) | | |
| ZM-T1S2C8 | 4 | 4 |
| (SEQ ID NO: 6) | | |
| ZM-T1S2C9 | 4 | 6 |
| (SEQ ID NO: 7) | | |
| ZM-T2S1C5 | 4 | 6 |
| (SEQ ID NO: 15) | | |
| ZM-T2S2C9 | 5 | 5 |
| (SEQ ID NO: 17) | | |

0-9 scale based on the raw data first being normalized to the respective single gene control, then ranked based on the highest and lowest values.
0 = expression is 40%-50% of the single gene control
1 = expression is 50%-60% of the single gene control
2 = expression is 60%-70% of the single gene control
3 = expression is 70%-80% of the single gene control
4 = expression is 80%-90% of the single gene control
5 = expression is 90%-100% of the single gene control
6 = expression is 100%-110% of the single gene control
7 = expression is 110%-120% of the single gene control
8 = expression is 120%-130% of the single gene control
9 = expression is >130% of the single gene control

[0184] Sixteen CTBs identified from the Arabidopsis activation-tagged lines were tested for their impact on the expression of the upstream and downstream cassettes in a gene stack configuration by placing the CTB between tandemly oriented expression cassettes (FIG. 17). Results from expression in maize in a first pass analysis are shown in Table 8.

TABLE 8

| CTB | First Cassette | Second Cassette |
|---|---|---|
| No CTB | 3 | 2 |
| INS1 | 1 | 1 |
| (SEQ ID NO: 36) | | |
| INS2 | 3 | 4 |
| (SEQ ID NO: 37) | | |
| INS3 | 0 | 0 |
| (SEQ ID NO: 38) | | |
| INS4 | 9 | 8 |
| (SEQ ID NO: 39) | | |
| INS5 | 0 | 0 |
| (SEQ ID NO: 40) | | |
| INS6 | 3 | 4 |
| (SEQ ID NO: 41) | | |
| INS7 | 1 | 3 |
| (SEQ ID NO: 42) | | |
| INS8 | 1 | 1 |
| (SEQ ID NO: 43) | | |
| INS9 | 1 | 2 |
| (SEQ ID NO: 44) | | |
| INS10 | 2 | 2 |
| (SEQ ID NO: 45) | | |
| INS11 | 2 | 4 |
| (SEQ ID NO: 46) | | |
| INS12 | 2 | 4 |
| (SEQ ID NO: 47) | | |
| INS24 | 2 | 2 |
| (SEQ ID NO: 48) | | |
| INS25 | 0 | 0 |
| (SEQ ID NO: 49) | | |
| INS26 | 0 | 0 |
| (SEQ ID NO: 50) | | |
| INS27 | 4 | 5 |
| (SEQ ID NO: 51) | | |

0-9 scale based on the raw data first being normalized to the respective single gene control, then ranked based on the highest and lowest values.
0 = expression is 40%-50% of the single gene control
1 = expression is 50%-60% of the single gene control
2 = expression is 60%-70% of the single gene control
3 = expression is 70%-80% of the single gene control
4 = expression is 80%-90% of the single gene control
5 = expression is 90%-100% of the single gene control
6 = expression is 100%-110% of the single gene control
7 = expression is 110%-120% of the single gene control
8 = expression is 120%-130% of the single gene control
9 = expression is >130% of the single gene control

[0185] Similar results were obtained from experiments in other tissue types including R1 silk, leaf, and husk.

[0186] As evident from the results above, where gene expression in a stack configuration is affected by adjacent cassettes, several CTB candidates were able to reduce the negative effects on gene expression.

### Example 8: Testing CTB-Like Candidates in Peg-Mediated Transformation of Maize Leaf Protoplasts

[0187] Protoplasts were isolated from leaf mesophyll cells from 7-day old etiolated maize seedlings using a modified protocol disclosed in (Sheen, Plant Physiol. 127: 1466-1475, 2001). Around 5 pmol of DNA (FIG. 5) was transfected into the protoplasts using 40% PEG. Transfected protoplasts were incubated at room temperature for 16 hours. The constitutive red fluorescence (TAG-RFP) was used for normalization while the CaMV35S enhancer and minimal promoter along with the putative insulator-like sequence were used to drive green fluorescence (ZS-GREEN). Fluorescence of both proteins was quantified using an automated inverted microscope (Biotek Cytation 5). Fluorescence was measured at the individual protoplast level, the green fluorescence was normalized to the red fluorescence, and geometric mean was calculated for all protoplasts (˜2000-3000) in the transfection.

[0188] Together, the CaMV35S enhancer and minimal promoter drove strong expression of ZS-GREEN in the protoplasts. In the absence of the enhancer, the minimal 35S promoter produced expression levels that were not detectable in the current system. Results from testing 18 unique CTB sequences identified from Arabidopsis and one synthetic sequence (AT-5-IV-8 CTB) using maize leaf protoplasts are presented in Table 9. Table 9 shows the expression of a reporter gene in maize leaf protoplasts in the presence or absence of CTBs. Results are presented as the average (AVG) of the geometric mean from two replicates and the Standard Deviation (STD).

TABLE 9

| | | | | Geo | Geo | Geo | Geo |
|---|---|---|---|---|---|---|---|
| | | | Reporter | Mean | Mean | Mean | Mean |
| Class | Enhancer | CTB | Promoter | Rep1 | Rep2 | AVG | STD |
| Control - | CAMV35S | None | CAMV35S | 1.071 | 0.996 | 1.033 | 0.053 |
| No CTB | ENH | | PRO (MIN) | | | | |
| Control - | None | None | CAMV35S | 0.254 | 0.219 | 0.237 | 0.024 |
| No ENH | | | PRO (MIN) | | | | |
| Arabidopsis | CAMV35S | AT-5-IV-2 | CAMV35S | 0.556 | 0.484 | 0.520 | 0.051 |
| | ENH | CTB | PRO (MIN) | | | | |
| Arabidopsis | CAMV35S | AT-5-IV-7 | CAMV35S | 0.199 | 0.178 | 0.188 | 0.015 |
| | ENH | CTB | PRO (MIN) | | | | |
| Arabidopsis | CAMV35S | AT-4G15300- | CAMV35S | 0.882 | 0.692 | 0.787 | 0.134 |
| | ENH | I CTB | PRO (MIN) | | | | |
| Arabidopsis | CAMV35S | AT-4G15300- | CAMV35S | 0.482 | 0.441 | 0.462 | 0.029 |
| | ENH | II CTB | PRO (MIN) | | | | |
| Arabidopsis | CAMV35S | AT-4G15300- | CAMV35S | 0.352 | 0.322 | 0.337 | 0.021 |
| | ENH | IV CTB | PRO (MIN) | | | | |
| Arabidopsis | CAMV35S | AT-4G15280- | CAMV35S | 0.516 | 0.410 | 0.463 | 0.075 |
| | ENH | I CTB | PRO (MIN) | | | | |
| Arabidopsis | CAMV35S | AT-4G15280- | CAMV35S | 0.126 | 0.115 | 0.121 | 0.008 |
| | ENH | II CTB | PRO (MIN) | | | | |
| Arabidopsis | CAMV35S | AT-4G15280- | CAMV35S | 0.453 | 0.454 | 0.454 | 0.000 |
| | ENH | III CTB | PRO (MIN) | | | | |
| Arabidopsis | CAMV35S | AT-4G15280- | CAMV35S | 0.627 | 0.580 | 0.603 | 0.034 |
| | ENH | IV CTB | PRO (MIN) | | | | |
| Arabidopsis | CAMV35S | AT-1G60140- | CAMV35S | 0.422 | 0.333 | 0.377 | 0.063 |
| | ENH | I CTB | PRO (MIN) | | | | |
| Arabidopsis | CAMV35S | AT-1G60140- | CAMV35S | 0.441 | 0.392 | 0.416 | 0.035 |
| | ENH | II CTB | PRO (MIN) | | | | |
| Arabidopsis | CAMV35S | AT-1G60140- | CAMV35S | 0.713 | 0.818 | 0.766 | 0.074 |
| | ENH | III CTB | PRO (MIN) | | | | |
| Arabidopsis | CAMV35S | AT-1G60140- | CAMV35S | 0.692 | 0.745 | 0.718 | 0.038 |
| | ENH | IV CTB | PRO (MIN) | | | | |
| Arabidopsis | CAMV35S | AT-4G15290- | CAMV35S | 0.368 | 0.381 | 0.375 | 0.009 |
| | ENH | I INS | PRO (MIN) | | | | |
| Arabidopsis | CAMV35S | AT-4G15290- | CAMV35S | 0.473 | 0.490 | 0.482 | 0.012 |
| | ENH | II INS | PRO (MIN) | | | | |
| Arabidopsis | CAMV35S | AT-4G15290- | CAMV35S | 0.732 | 0.929 | 0.830 | 0.139 |
| | ENH | III INS | PRO (MIN) | | | | |
| Arabidopsis | CAMV35S | AT-4G15290- | CAMV35S | 0.225 | 0.226 | 0.226 | 0.001 |
| | ENH | IV INS | PRO (MIN) | | | | |
| Arabidopsis | CAMV35S | AT-5-III-1 | CAMV35S | 0.207 | 0.147 | 0.177 | 0.042 |
| | ENH | | PRO (MIN) | | | | |
| Synthetic | CAMV35S | AT-5-IV-8 | CAMV35S | 0.206 | 0.177 | 0.192 | 0.021 |
| | ENH | CTB | PRO (MIN) | | | | |

[0189] Results from testing 35 unique CTB sequences identified from maize genome mining and 5 combinations of 2 sequences in tandem, using maize leaf protoplasts are presented in Table 10. Table 10 shows the expression of a reporter gene in maize leaf protoplasts in the presence or absence of CTBs. Results are presented as the average (AVG) of the geometric mean from two replicates and the Standard Deviation (STD).

TABLE 10

| | | | | Geo | Geo | Geo | Geo |
|---|---|---|---|---|---|---|---|
| | | | Reporter | Mean | Mean | Mean | Mean |
| Class | Enhancer | CTB | Promoter | Rep1 | Rep2 | AVG | STD |
| Control - | CAMV35S | None | CAMV35S | 1.217 | 1.291 | 1.254 | 0.053 |
| No CTB | ENH | | PRO (MIN) | | | | |
| Control - | None | None | CAMV35S | 0.236 | 0.224 | 0.230 | 0.008 |
| No ENH | | | PRO (MIN) | | | | |
| Zea mays | CAMV35S | ZM-T1S1C1 | CAMV35S | 0.440 | 0.390 | 0.415 | 0.035 |
| | ENH | CTB | PRO (MIN) | | | | |
| Zea mays | CAMV35S | ZM-T1S2C3 | CAMV35S | 0.501 | 0.466 | 0.483 | 0.024 |
| | ENH | CTB | PRO (MIN) | | | | |
| Zea mays | CAMV35S | ZM-T1S2C3- | CAMV35S | 0.419 | 0.370 | 0.395 | 0.035 |
| | ENH | 2 CTB | PRO (MIN) | | | | |
| Zea mays | CAMV35S | ZM-T1S2C6 | CAMV35S | 0.441 | 0.412 | 0.427 | 0.020 |
| | ENH | CTB | PRO (MIN) | | | | |
| Zea mays | CAMV35S | ZM-T1S2C7 | CAMV35S | 0.374 | 0.280 | 0.327 | 0.066 |
| | ENH | CTB | PRO (MIN) | | | | |
| Zea mays | CAMV35S | ZM-T1S2C8 | CAMV35S | 0.443 | 0.424 | 0.433 | 0.014 |
| | ENH | CTB | PRO (MIN) | | | | |
| Zea mays | CAMV35S | ZM-T1S2C9 | CAMV35S | 0.925 | 0.735 | 0.830 | 0.134 |
| | ENH | CTB | PRO (MIN) | | | | |
| Zea mays | CAMV35S | ZM-T1S2C9- | CAMV35S | 0.126 | 0.113 | 0.120 | 0.009 |
| | ENH | 2 CTB | PRO (MIN) | | | | |
| Zea mays | CAMV35S | ZM-T1S2C1 | CAMV35S | 0.752 | 0.626 | 0.689 | 0.088 |
| | ENH | CTB | PRO (MIN) | | | | |
| Zea mays | CAMV35S | ZM-T1S6C6 | CAMV35S | 0.342 | 0.277 | 0.310 | 0.046 |
| | ENH | CTB | PRO (MIN) | | | | |
| Zea mays | CAMV35S | ZM-T1S6C1 | CAMV35S | 0.947 | 0.817 | 0.882 | 0.092 |
| | ENH | CTB | PRO (MIN) | | | | |
| Zea mays | CAMV35S | ZM-T2S1C1 | CAMV35S | 0.736 | 0.535 | 0.636 | 0.142 |
| | ENH | CTB | PRO (MIN) | | | | |
| Zea mays | CAMV35S | ZM-T2S1C3 | CAMV35S | 0.626 | 0.540 | 0.583 | 0.061 |
| | ENH | CTB | PRO (MIN) | | | | |
| Zea mays | CAMV35S | ZM-T2S1C4 | CAMV35S | 0.841 | 0.830 | 0.836 | 0.008 |
| | ENH | CTB | PRO (MIN) | | | | |
| Zea mays | CAMV35S | ZM-T2S1C5 | CAMV35S | 1.194 | 0.925 | 1.060 | 0.190 |
| | ENH | CTB | PRO (MIN) | | | | |
| Zea mays | CAMV35S | ZM-T2S2C8 | CAMV35S | 0.263 | 0.192 | 0.227 | 0.050 |
| | ENH | CTB | PRO (MIN) | | | | |
| Zea mays | CAMV35S | ZM-T2S2C9 | CAMV35S | 1.345 | 1.115 | 1.230 | 0.163 |
| | ENH | CTB | PRO (MIN) | | | | |
| Zea mays | CAMV35S | ZM-T2S2C4 | CAMV35S | 2.147 | 1.887 | 2.017 | 0.183 |
| | ENH | CTB | PRO (MIN) | | | | |
| Zea mays | CAMV35S | ZM-T2S2C4- | CAMV35S | 0.864 | 0.740 | 0.802 | 0.088 |
| | ENH | 2 CTB | PRO (MIN) | | | | |
| Zea mays | CAMV35S | ZM-T2S2C2 | CAMV35S | 1.281 | 1.252 | 1.266 | 0.021 |
| | ENH | CTB | PRO (MIN) | | | | |
| Zea mays | CAMV35S | ZM-T2S2C3 | CAMV35S | 0.601 | 0.564 | 0.583 | 0.026 |
| | ENH | CTB | PRO (MIN) | | | | |
| Zea mays | CAMV35S | ZM-T2S2C2- | CAMV35S | 0.859 | 0.979 | 0.919 | 0.084 |
| | ENH | 2 CTB | PRO (MIN) | | | | |
| Zea mays | CAMV35S | ZM-T2S2C2- | CAMV35S | 0.944 | 0.819 | 0.882 | 0.088 |
| | ENH | 3 CTB | PRO (MIN) | | | | |
| Zea mays | CAMV35S | ZM-T2S2C2- | CAMV35S | 0.182 | 0.150 | 0.166 | 0.023 |
| | ENH | 4 CTB | PRO (MIN) | | | | |
| Zea mays | CAMV35S | ZM-T2S2C7 | CAMV35S | 0.553 | 0.489 | 0.521 | 0.045 |
| | ENH | CTB | PRO (MIN) | | | | |
| Zea mays | CAMV35S | ZM-T2S2C5 | CAMV35S | 0.356 | 0.351 | 0.354 | 0.004 |
| | ENH | CTB | PRO (MIN) | | | | |
| Zea mays | CAMV35S | ZM-T2S2C5- | CAMV35S | 0.898 | 1.060 | 0.979 | 0.115 |
| | ENH | 2 CTB | PRO (MIN) | | | | |
| Zea mays | CAMV35S | ZM-T2S2C5- | CAMV35S | 0.396 | 0.390 | 0.393 | 0.004 |
| | ENH | 3 CTB | PRO (MIN) | | | | |
| Zea mays | CAMV35S | ZM-T2S2C5- | CAMV35S | 0.972 | 0.875 | 0.924 | 0.069 |
| | ENH | 4 CTB | PRO (MIN) | | | | |
| Zea mays | CAMV35S | ZM-T1S1C5 | CAMV35S | 1.5715 | 0.9535 | 1.262 | 0.437 |
| | ENH | CTB | PRO (MIN) | | | | |
| Zea mays | CAMV35S | ZM-T1S6C5 | CAMV35S | 0.7203 | 0.5131 | 0.617 | 0.147 |
| | ENH | CTB | PRO (MIN) | | | | |
| Zea mays | CAMV35S | ZM-T2S1C5- | CAMV35S | 0.7849 | 0.6100 | 0.697 | 0.124 |
| | ENH | 2 CTB | PRO (MIN) | | | | |
| Zea mays | CAMV35S | ZM-T2S1C5- | CAMV35S | 0.7853 | 0.4706 | 0.628 | 0.222 |
| | ENH | 3 CTB | PRO (MIN) | | | | |
| Zea mays | CAMV35S | ZM-T1S6C5- | CAMV35S | 3.2063 | 2.6999 | 2.953 | 0.358 |
| | ENH | 2 CTB | PRO (MIN) | | | | |
| Zea mays | CAMV35S | ZM-T2S2C5- | CAMV35S | 1.4667 | 1.2385 | 1.353 | 0.161 |
| | ENH | 5 CTB | PRO (MIN) | | | | |
| Zea mays | CAMV35S | ZM-T1S1C5 | CAMV35S | 1.5929 | 2.0715 | 1.832 | 0.338 |
| | ENH | CTB//ZM- | PRO (MIN) | | | | |
| | | T2S2C5-5 | | | | | |
| | | CTB | | | | | |
| Zea mays | CAMV35S | ZM-T1S6C5 | CAMV35S | 1.0629 | 0.7369 | 0.900 | 0.231 |
| | ENH | CTB//ZM- | PRO (MIN) | | | | |
| | | T1S6C5-2 | | | | | |
| | | CTB | | | | | |
| Zea mays | CAMV35S | ZM-T2S1C5- | CAMV35S | 1.0021 | 0.7841 | 0.893 | 0.154 |
| | ENH | 2 CTB//ZM- | PRO (MIN) | | | | |
| | | T2S1C5-3 | | | | | |
| | | CTB | | | | | |
| Zea mays | CAMV35S | ZM-T1S2C3 | CAMV35S | 0.6999 | 0.4759 | 0.588 | 0.158 |
| | ENH | TRB//ZM- | PRO (MIN) | | | | |
| | | T2S2C3 CTB | | | | | |
| Zea mays | CAMV35S | ZM-T2S2C4 | CAMV35S | 2.8680 | 2.3108 | 2.589 | 0.394 |
| | ENH | TRB//ZM- | PRO (MIN) | | | | |
| | | T2S2C4-2 | | | | | |
| | | CTB | | | | | |

### Example 9: Endogenous DNA CTB Elements for Stable Transgenes Performance in Breeding Products

[0190] The performance of transgenes can vary significantly in different germplasm or environments due to the interactions of transgene×genetics or transgene×genetics×environments. Thus, a breeding program must conduct thorough trait evaluations in different germplasm and environments. One hypothesis of trait variation across germplasm and environments is due to specific regulatory elements existing in specific genetics and causing unfavorable interactions. For example, the nearby or distal endogenous enhancers could unfavorably increase the level of transgene expression and cause unintended agronomic consequences. In addition, plant genomes often contain large fraction of transposon elements which can cause unintended transgene silencing.

[0191] This example is about a novel trait design concept and application of CTB identification and elements to improve the robustness of transgene performance across different germplasm and environments by preventing or mitigating the transgene×genetics interaction or transgene×genetics×environments interaction. CTB is one type of regulatory element in genome to preserve the gene expression level of their target genes by two possible modes of actions or both. One mode of action is called enhancer-blocking effect and the other is silence barrier effect.

[0192] The identified endogenous CTB elements in crop genomes can be placed as a single insulator element (FIG. 6) or in pair for the traits of interest (FIG. 7). A custom computational workflow was developed to identify the maize endogenous insulator elements based on the gene expression and chromatin loop data. The experimental chromatin loop data can detect the DNA interaction between the target genes and their regulatory elements. More than 800 putative insulator elements were identified by computational search and 40 CTBs or CTB pairs are being tested in the protoplast system for validation.

[0193] The validated insulator will enable the trait performance independent on the genetics and environments so that the transgenes are robust to broad germplasm and environments. The successful deployment of insulator element in trait product means significant operation cost saving with stable trait performance.

### Example 10: CTB Vectors for Soy Transformation

[0194] Four CTB vectors (B-E) were built for soybean transformation. Each vector contained four identical expression cassettes. The first cassette comprised a Cre recombinase gene under the control of soybean heat-shock GmHSP17.3B promoter (“CRE Cassette”) for excision. The second cassette comprised a spectinomycin-resistance SPCN gene as a plant selectable marker (“SPCN Cassette”). The third cassette comprised DsRED as a visual marker in transformed plant cells (“DsRed Cassette”). The fourth cassette comprised an insecticidal protein gene as an exemplary trait gene (“Trait Cassette”). The insulator candidates in vectors B-D flanked the Cre Cassette. Vector A, used as a negative control, comprised the four identical expression cassettes but lacked insulator candidates (no insulation). The insulator configurations and candidates tested, namely, AT-5-IV-2 INS, AT-5-III-1 INS, AT-5-IV-7 INS, are shown in Table 11.

TABLE 11

| Vec- | |
|---|---|
| tor | Description |
| A | RB + LOXP + Cre Cassette + SPCN Cassette + DsRed Cassette + |
| | LOXP + Trait Cassette + LB |
| B | RB + LOXP + AT-5-IV-2 INS + Cre Cassette + AT-5-IV-2 INS + |
| | SPCN Cassette + DsRed Cassette + LOXP + Trait Cassette + LB |
| C | RB + LOXP + AT-5-III-1 INS + Cre Cassette + AT-5-IV-7 INS + |
| | SPCN Cassette + DsRed Cassette + LOXP + Trait Cassette + LB |
| D | RB + LOXP + AT-5-IV-2 INS + Cre Cassette + AT-5-III-1 INS + |
| | SPCN Cassette + DsRed Cassette + LOXP + Trait Cassette + LB |
| E | RB + LOXP + AT-5-IV-7 INS + Cre Cassette + AT-5-III-1 INS + |
| | SPCN Cassette + DeRed Cassette + LOXP + Trait Cassette + LB |

[0195] Mature dry seed from soybean 93Y21 cultivar was surface-sterilized for 16 hours using chlorine gas, produced by mixing 3.5 mL of 12 N HCl with 100 mL of commercial bleach (5.25% sodium hypochloride), as described by Di et al. ((1996) Plant Cell Rep 15:746-750). Disinfected seeds were imbibed on semi-solid medium containing 5 g/l sucrose and 6 g/l agar at room temperature in the dark. After 6-8 hours imbibition, the seeds were soaked in sterile distilled water at room temperature in the dark for overnight (˜16 hrs). Intact embryonic axes (EA) were isolated from the imbibed seeds. Ochrobactrum-mediated EA transformation was carried out as described below.

[0196] Ochrobactrum haywardense H1 lines containing the vectors listed in Table 11 were used for transformation. A volume of 15 mL of Ochrobactrum haywardense H1 suspension (OD 0.5 at 600 nm) in infection medium composed of 1/10× Gamborg B5 basal medium, 30 g/L sucrose, 20 mM MES, 0.25 mg/L GA3, 1.67 mg/L BAP, 200 μM Acetosyringone and 1 mM DTT in PH 5.4) was added to about 200-300 EAs in 25×100 mm petri plates. The plates were sealed with parafilm (“Parafilm M” VWR Cat #52858), then sonicated (Sonicator-VWR model 50T) for 30 seconds. After sonication, the EAs were incubated 2 hrs at room temperature. After incubation, the excess bacterial suspension was removed and about 200-300 EAs were transferred to a single layer of autoclaved sterile filter paper (VWR #415/Catalog #28320-020) in 25×100 mm petri plates. The plates were sealed with Micropore tape (Catalog #1530-0, 3M, St. Paul, MN, USA) and incubated under dim light (1-2 E/m²/s), cool white fluorescent lamps for 16 hours/day at 21° C. for 3 days. After co-cultivation, the base of each EA was embedded in shoot induction medium (Production #R7100, PhytoTech Labs, Shawnee, KS, USA) containing 30 g/L sucrose, 6 g/L agar and 25 mg/L Spectinomycin (PhytoTech Labs) as a selectable agent and 500 mg/L cefotaxime (GoldBio, ST Louis, MO, USA). Shoot induction was carried out in a Percival Biological Incubator or growth room at 26° C. with a photoperiod of 16 hours and a light intensity of 60-100 E/m²/s.

[0197] After 5-6 weeks in selection medium, the spectinomycin-resistant shoots were counted to calculate transformation frequencies (Table 12). Transformation frequencies of vectors B-D ranged from 19.8%-31.3%, while the transformation frequency of control vector A (no insulation) was 30%.

TABLE 12

| Vector | Total #EA Transformed | # SPCN Resistant Shoots Recovered | |
|---|---|---|---|
| A | 1530 | 459 | (30%) |
| B | 2310 | 725 | (31.3%) |
| C | 1910 | 380 | (19.8%) |
| D | 1920 | 492 | (25.6%) |
| E | 1830 | 305 | (16.6%) |

[0198] Alternative experiments are contemplated.

[0199] In one experiment, CTB candidates are cloned between the CAMV35S enhancer and 35S minimal promoter or between the CAMV35S enhancer and 35S minimal promoter, and UBQ3 terminator in a TagRFP expression cassette. The negative control (no insulation) is a vector with no insulator and the positive control (max insulation) is a vector with only the 35S promoter (e.g. no CAMV35S enhancer). The CAMV35S minimal promoter produces no TagRFP fluorescence in the absence an enhancer.

[0200] In another experiment, these vectors are tested in various dicot plants such as Ochrobactrum-mediated soybean transformation, Agrobacterium rhizogenes-mediated soybean hairy root transformation system (Cho et al. High-efficiency induction of soybean hairy roots and propagation of the soybean cyst nematode, Planta, 210, 195-204. 2000), or Agrobacterium tumefaciens-mediated alfalfa, canola, cotton, soybean, and sunflower transformation. The quantification of fluorescence is performed using Zeica fluorescent microscope in transiently and stably transformed shoots and hairy roots in dicot plants to evaluate CTB candidate performance.

### Example 11: Motifs Enriched Among Selected CTBs

[0201] Thirteen CTB candidates were selected for motif analysis using a Motif Alignment and Search Tool (MAST version 5.1.1; Timothy L. Bailey and Michael Gribskov, “Combining evidence using p-values: application to sequence homology searches”, Bioinformatics, 14(1):48-54, 1998). Motifs that were identified are described in Table 13. Representative sequences comprising these motifs are shown in FIG. 11. U=T # alias Uracil to Thymine (permit U in input sequences); R=AG; Y=CT; K=GT; M=AC; S=CG; W=AT; B=CGT; D=GAT; H=ACT; V=ACG; N=ACGT # wildcard symbol.

TABLE 13

| Motif | | SEQ |
|---|---|---|
| ID: | Motif Sequence | ID NO: |
| 1 | TGTTTTTYTCT | 133 |
| 2 | GDTGARGADGGACNVSGYGSHNG | 134 |
| 3 | CGGCCCAA | |
| 4 | RKGCCATANAGYSBDRCCMKTCSAYCGT | 135 |
| 5 | ATTCACGAGGTAGCC | 136 |
| 6 | GVYCRSMKSKTTSVTGSGAYYCBGCVRAC | 137 |
| 7 | GCSSGGGGCA | 138 |
| 8 | CCAACCGA | |
| 9 | TTCCAGGC | |
| 10 | AGAGATGTKTGGA | 139 |
| 11 | GGGASCWCGA | 140 |
| 12 | CGTGCGRAA | |
| 13 | GCCCAAAMC | |
| 14 | CCCCYACC | |
| 15 | GGTCCATT | |
| 16 | SACGCSGC | |
| 17 | AACCATCA | |
| 18 | GGSWGWGGAGG | 141 |
| 19 | TCCTTGSC | |
| 20 | GSTGAAACG | |

### Example 12: Production of Transgenic Maize Events Via Agrobacterium

[0202] Agrobacterium tumefaciens harboring a binary donor vector containing a phosphomannose-isomerase selectable marker (PMI) in a promoter trap, and a reporter marker (dsRed or YFP) was streaked out from a −80° C. frozen aliquot onto solid PHI-L medium and cultured at 28° C. in the dark for 2-3 days. PHI-L media comprised 25 ml/L stock solution A, 25 ml/L stock solution B, 450.9 ml/L stock solution C and spectinomycin added to a concentration of 50 mg/L in sterile ddH2O (stock solution A: K2HPO4 60.0 g/L, NaH2PO4 20.0 g/L, adjust pH to 7.0 with KOH and autoclave; stock solution B: NH4C1 20.0 g/L, MgSO4-7H2O 6.0 g/L, KCl 3.0 g/L, CaCl₂) 0.20 g/L, FeSO4.7H2O 50.0 mg/L, autoclave; stock solution C: glucose 5.56 g/L, agar 16.67 g/L and autoclave). Agrobacterium to be used for transformation were grown on solid medium, and/or in liquid culture, as described below.

### Growing Agrobacterium on Solid Medium

[0203] A single colony or multiple colonies were picked from the master plate and streaked onto a plate containing PHI-M medium (yeast extract (Difco) 5.0 g/L; peptone (Difco) 10.0 g/L; NaCl 5.0 g/L; agar (Difco) 15.0 g/L; pH 6.8, containing 50 mg/L spectinomycin), and incubated at 28° C. in the dark for 1-2 days.

[0204] Five mL Agrobacterium infection medium (PHI-A: CHU(N6) basal salts (Sigma C-1416) 4.0 g/L, Eriksson's vitamin mix (1000×, Sigma-1511) 1.0 ml/L; thiamine-HCl 0.5 mg/L (Sigma); 2,4-dichlorophenoxyacetic acid (2,4-D, Sigma) 1.5 mg/L; L-proline (Sigma) 0.69 g/L; sucrose (Mallinckrodt) 68.5 g/L; glucose (Mallinckrodt) 36.0 g/L; pH 5.2; or, PHI-I: MS salts (GIBCO BRL) 4.3 g/L; nicotinic acid (Sigma) 0.5 mg/L; pyridoxine-HCl (Sigma) 0.5 mg/L; thiamine-HCl 1.0 mg/L; myo-inositol (Sigma) 0.10 g/L; vitamin assay casamino acids (Difco Lab) 1 g/L; 2, 4-D 1.5 mg/L; sucrose 68.50 g/L; glucose 36.0 g/L; adjust pH to 5.2 w/KOH and filter-sterilize) and 5 μL of 100 mM 3′-5′-dimethoxy-4′-hydroxyacetophenone (acetosyringone) were added to a 14 mL tube. About 3 full loops of Agrobacterium were suspended in the tube which was then vortexed to make an even suspension. One mL of the suspension was transferred to a spectrophotometer tube and the OD of the suspension was adjusted to 0.35-2.0 at 550 nm to yield an Agrobacterium concentration of about 0.5-2.0×109 cfu/mL. The final Agrobacterium suspension was aliquoted into 2 mL microcentrifuge tubes, each containing 1 mL of the suspension. The suspensions were then used for transformation as soon as possible.

### Growing Agrobacterium on Liquid Medium

[0205] One day before infection, a 125 mL flask was set up with 30 mL of 557A media (10.5 g/L potassium phosphate dibasic, 4.5 g/L potassium phosphate monobasic, 1.0 g/L ammonium sulfate, 0.5 g/L sodium citrate dihydrate, 0.2% (w/v) sucrose, 1 mM magnesium sulfate) with 30 μL each of spectinomycin (50 mg/mL) and acetosyringone (20 mg/mL). One-half loopful of Agrobacterium was suspended into each flask grown overnight at 28° C. with shaking at 200 rpm. The Agrobacterium culture was centrifuged at 5000 rpm for 10 min. The supernatant was removed and the Agrobacterium infection medium+acetosyringone solution was added. The bacteria were resuspended by vortexing and the OD of Agrobacterium suspension was adjusted to 0.35-2.0 at 550 nm.

### Maize Transformation

[0206] Ears of a maize (Zea mays L.) cultivar, PHR03, were surface-sterilized for 15-20 min in 20% (v/v) bleach (5.25% sodium hypochlorite) plus 1 drop of Tween 20 followed by 3 washes in sterile water. Immature embryos (IEs), typically 1.5-1.8 mm, were isolated from ears and were placed in 2 ml of the Agrobacterium infection medium+acetosyringone solution. The solution was drawn off and 1 ml of Agrobacterium suspension was added to the embryos, vortexed for 5-10 seconds, and then incubated 5 min at room temperature. The suspension of Agrobacterium and embryos were poured onto co-cultivation medium. Any embryos left in the tube were transferred to the plate using a sterile spatula. The Agrobacterium suspension was drawn off and the embryos placed axis side down on the media. The plate was sealed with PARAFILM™ tape and incubated in the dark at 21° C. for 1-3 days of co-cultivation.

[0207] Embryos were transferred to resting medium without selection. Three to 7 days later, they were transferred to green tissue induction medium (DBC3: 4.3 g/L MS salts, 30 g/L maltose, 1 mg/mL thiamine-HCl, 0.25 g/L myo-inositol, 1 g/L N-Z-amine-A (casein hydrolysate), 0.69 g/L proline, 4.9 μM CuSO4, 1.0 mg/L 2,4-D, 0.5 mg/L BAP; pH 5.8 3.5 g/L Phytagel) supplemented with mannose or other appropriate selective agent. Three weeks after the first round of selection, cultures were transferred to fresh green tissue induction medium containing a selective agent at 3- to 4-week intervals. Once transformed, transgenic green tissues are selected and cultured essentially as described in U.S. Pat. No. 7,102,056, and publication US20130055472, each of which is herein incorporated by reference in their entirety.

### Example 13: Generation of Target Lines for Agrobacterium SSI

[0208] A site-specific integration (SSI) target line was created in a maize cultivar, using Agrobacterium mediated immature embryo transformation essentially as described in U.S. Pat. No. 6,187,994, herein incorporated by reference in its entirety. A target site operably linked to a promoter trap is used to aid in target event identification, and SSI event identification. Lines comprising a promoter trap target site were generated by transformation with a construct comprising: PSA2-LOXP-UbiZMPro-FRT1-NptII::PinII+-FRT6.

### Example 14: Binary Vector Design for Agro-Mediated Site-Specific Integration in Plants

[0209] The binary vector design contains a Donor DNA flanked by heterologous FRT sites (FRT1/6), a FLP gene and the DevGene on the T-DNA delivered by Agro strain LBA4404 TD-Thy/PHP71539:
[0210] RB-OSActPro::WUS::IN2-1 TERM+UbiZMPro::BBM::OS-T28 TERM+UbiZMPro::FLP::PINII TERM-AT-T9 TERM+FRT1-PMI:PINII TERM-CZ19B1 TERM+ATTR4-CCDB-ATTR3+FRT6-LB.

[0211] Immature embryos with the target line are infected, and the SSI events are selected and characterized.

### Example 15: Promoter for Germline Excision

[0212] Three different maize specific germline promoters, RKD1, RKD2, and PG47 driving a Cre-recombinase gene were tested for excising marker genes in T1 events. RKD1 and RKD2 are ovule specific promoter, while PG47 is a pollen specific promoter and are expressed in the specific tissue-types.

### Example 16: Binary Vectors Design for Agro-Mediated Marker-Free Site-Specific Integration in Plants

[0213] The binary vector designs contain the Donor DNA plus an expression cassette containing the germline specific promoter driving a Cre-recombinase gene flanked by the 3′LOXP site placed downstream of the PMI::PINII TERM. The binary vectors designs (RKD1Pro::Cre), (RKD2:Cre), and (PG47::Cre) were delivered by an Agro strain:
[0214] RB-OSActPro::WUS::IN2-1 TERM+UbiZMPro::BBM::OS-T28 TERM+UbiZMPro::FLP::PINII TERM-AT-T9 TERM+FRT1-PMI:PINII TERM-CZ19B1 TERM+ZMRKD1::MO-CRE:SP-CP18 TERM+LOXP-ATTR4-CCDB-ATTR3+FRT6-LB
[0215] RB-OSActPro::WUS::IN2-1 TERM+UbiZMPro::BBM::OS-T28 TERM+UbiZMPro::FLP::PINII TERM-AT-T9 TERM+FRT1-PMI:PINII TERM-CZ19B1 TERM+ZMRKD2::MO-CRE: SP-CP18 TERM+LOXP-ATTR4-CCDB-ATTR3+FRT6-LB
[0216] RB-OSActPro::WUS::IN2-1 TERM+UbiZMPro::BBM::OS-T28 TERM+30 UbiZMPro::FLP::PINII TERM-AT-T9 TERM+FRT1-PMI:PINII TERM-CZ19B1 TERM+PG47Pro::MO-CRE:SP-CP18 TERM+LOXP-ATTR4-CCDB-ATTR3+FRT6-LB

[0217] Immature embryos with the target line were infected, and the SSI events were selected and characterized.

### Example 17: Testing of RKD1, RKD2 and PG47 Construct for Site-Specific Integration

[0218] Following retransformation of immature embryos containing the target with Agrobacterium strains containing the three binary vectors described above with insecticidal protein (IP) genes A and B, SSI events were selected on a media supplemented with mannose (PMI selection as described in U.S. Pat. Nos. 5,994,629 and 5,767,378 each of which is incorporated herein by reference in its entirety). Putative callus events were identified by culturing the retransformed embryos on media supplemented with mannose. Transformants wherein the target locus (NptII) was replaced with the polynucleotide construct (PMI/MO-CRE/IPs genes) were identified by their callus morphology. These events were regenerated and the TO plants were analyzed using standard qPCR assays. Table 14 shows the transformation frequency and frequency of site-specific recombination events recovered from maize inbred line HC69.

TABLE 14

| Trait cassette | Promoter: CRE | Embryo # | T0% | T0 QE % | UQE % |
|---|---|---|---|---|---|
| A | ZM-RKD1 | 405 | 21.5 | 44.7 | 9.6 |
| | ZM-RKD2 | 408 | 18.9 | 37.5 | 7.1 |
| | PG47 | 393 | 26.5 | 43.9 | 11.6 |
| B | RKD1 | 424 | 6.4 | 48.1 | 3.1 |
| | RKD2 | 410 | 5.9 | 54.2 | 3.2 |
| | PG47 | 416 | 13.2 | 63.6 | 8.4 |

[0219] The process of generating marker-free SSI event generation is presented in FIG. 16. Once the TO SSI events are identified, these events are grown to maturity and pollinated with wild-type pollens, transgenic pollen or selfed to determine the excision efficiency with different germline promoters.

### Example 18: Confirmation of Marker-Gene Excision in T₁ Plants

[0220] Three T0 SSI events identified in Table 14 were grown to maturity and different pollination treatments, 1) self, 2) carry-in (wild-type pollen) and 3) carry-out (transgenic pollen to wild-type plant) were carried out to confirm excision. Post pollination, the T₁ seeds were germinated, sampled and standard PCR assay designed to detect the FRT junctions (FRT1 & FRT6) and copy number determination of PMI, MoCRE gene and IP gene (Trait gene) were applied as shown in Table 15 (Poll. type=Pollination type). The assays detected the excised events null for the PMI selectable marker and Mo-CRE genes flanked by LOXP sites and identified the trait gene only events (FIG. 16).

TABLE 15

| | | FRT6 | | Trait | FRT1 | | |
|---|---|---|---|---|---|---|---|
| | Excision | junction | MoCRE | gene | junction | PMI | Poll. |
| Pro:CRE | types | PCR | PCR | copy # | PCR | copy # | type |
| PG47 | 1 copy | POSITIVE | 1 | 2 | POSITIVE | 1 | self |
| | excised | | | | | | |
| PG47 | 1 copy | POSITIVE | 1 | 2 | POSITIVE | 1 | self |
| | excised | | | | | | |
| PG47 | hemi | POSITIVE | NULL | 1 | NEGATIVE | NULL | self |
| | excised | | | | | | |
| PG47 | hemi | POSITIVE | NULL | 1 | NEGATIVE | NULL | self |
| | excised | | | | | | |
| PG47 | hemi | POSITIVE | NULL | 1 | NEGATIVE | NULL | carry |
| | excised | | | | | | out |
| PG47 | hemi | POSITIVE | NULL | 1 | NEGATIVE | NULL | carry |
| | excised | | | | | | out |
| PG47 | hemi | POSITIVE | NULL | 1 | NEGATIVE | NULL | carry |
| | excised | | | | | | out |
| ZM- | 1 copy | POSITIVE | 1 | 2 | POSITIVE | 1 | self |
| RKD1 | excised | | | | | | |
| ZM- | hemi | POSITIVE | NULL | 1 | NEGATIVE | NULL | carry |
| RKD1 | excised | | | | | | in |
| ZM- | hemi | POSITIVE | NULL | 1 | NEGATIVE | NULL | carry |
| RKD1 | excised | | | | | | in |
| ZM- | hemi | POSITIVE | NULL | 1 | NEGATIVE | NULL | carry |
| RKD1 | excised | | | | | | in |
| ZM- | homo | POSITIVE | NULL | 2 | NEGATIVE | NULL | self |
| RKD2 | excised | | | | | | |
| ZM- | homo | POSITIVE | NULL | 2 | NEGATIVE | NULL | self |
| RKD2 | excised | | | | | | |
| ZM- | homo | POSITIVE | NULL | 2 | NEGATIVE | NULL | self |
| RKD2 | excised | | | | | | |
| ZM- | homo | POSITIVE | NULL | 2 | NEGATIVE | NULL | self |
| RKD2 | excised | | | | | | |
| ZM- | homo | POSITIVE | NULL | 2 | NEGATIVE | NULL | self |
| RKD2 | excised | | | | | | |
| ZM- | hemi | POSITIVE | NULL | 1 | NEGATIVE | NULL | carry |
| RKD2 | excised | | | | | | in |
| ZM- | hemi | POSITIVE | NULL | 1 | NEGATIVE | NULL | carry |
| RKD2 | excised | | | | | | in |
| ZM- | hemi | POSITIVE | NULL | 1 | NEGATIVE | NULL | carry |
| RKD2 | excised | | | | | | in |

### Example 19: Segregation of the Trait Genes in T₁ Progenies

[0221] The excised T₁ plants were sampled and quantitative PCR designed to detect the copy number of the trait gene was carried out to confirm the segregation of the trait genes in T₁ progenies. The segregation analysis confirmed the expected Mendalian inheritance of the trait genes in the different pollination types. All three promoters showed the typical 1:2:1 segregation for the trait gene in the T₁ progenies of the marker free events (Table 16 (TO Poll.=T0 Pollination; Seg. ratio=Segregation ratio)).

TABLE 16

| | | | # T1 | | | | | | | |
|---|---|---|---|---|---|---|---|---|---|---|
| | | | plants | | Homo | Homo | Hemi | | | |
| | | T0 | for | Homo- | 1 copy | non- | non- | Hemi | | Seg. |
| Trait | Pro:CRE | Poll. | PCR | excised | excised | excised | excised | excised | Nulls | ratio |
| A | PG47 | Self | 52 | | 14 | 2 | 14 | 10 | 12 | 1:2:1 |
| | | Carry | 17 | | | | 10 | | 7 | 1:1 |
| | | in | | | | | | | | |
| | | Carry | 46 | | | | 2 | 23 | 21 | 1:1 |
| | | out | | | | | | | | |
| | RKD1 | Self | 8 | | 1 | | 3 | 1 | 3 | 1:2:1 |
| | | Carry | 15 | | | | | 7 | 8 | 1:1 |
| | | in | | | | | | | | |
| | RKD2 | Self | 45 | 12 | 3 | | 4 | 19 | 7 | 1:2:1 |
| | | Carry | 38 | | | | 2 | 18 | 18 | 1:1 |
| | | in | | | | | | | | |
| B | PG47 | Self | 76 | | 9 | 5 | 21 | 14 | 27 | 1:2:1 |
| | | Carry | 45 | | | | 28 | | 17 | 1:1 |
| | | in | | | | | | | | |
| | | Carry | 29 | | | | 2 | 15 | 12 | 1:1 |
| | | out | | | | | | | | |
| | RKD1 | Self | 37 | 7 | 3 | 1 | 6 | 8 | 12 | 1:2:1 |
| | | carry | 32 | | | | | 15 | 17 | 1:1 |
| | | in | | | | | | | | |
| | RKD2 | Self | 51 | 10 | 1 | | 1 | 25 | 14 | 1:2:1 |
| | | Carry | 68 | | | | | 37 | 31 | 1:1 |
| | | in | | | | | | | | |

### Example 20: Other Approaches with CTBS

[0222] The sequences derived for the methods described below can be tested between two expression cassettes containing reporter genes. Expression analysis will be performed to evaluate the neighboring effects on expression characteristics for both gene cassettes in a gene stack configuration relative to single gene vectors and gene stacked vectors without a CTB/CIS sequence. Examples of experimental data from these approaches are shown under each category. These methods, in addition to those described above, are contemplated, including but not limited to the following.

### Chromatin Modification:

[0223] Gene expression networks are typically controlled by chromatin modifications. The elements in open chromatin will be determined and evaluated for CTB/CIS activity. The sequences were mined from a proprietary maize ATAC-Seq database or from the DNase Hypersensitivity (DHS) external source (Plant DHS database, plantdhs.org/). Transient assays to date with some of these sequences (ranging from 30 bp to 1 kb) showed CTB/CIS activity. Selected CTBs were also evaluated in stable corn plants in different tissues (Tables 17-21).

TABLE 17
Results from leaves of stably transformed maize plants

| SEQ ID NO | CTB | First Cassette | Second Cassette |
|---|---|---|---|
| | No CTB | 3 | 1 |
| 221 | DHS1 | 6 | 2 |
| 222 | DHS2 | 1 | No expression |
| 223 | DHS3 | 1 | 3 |
| 224 | DHS4 | 5 | 5 |
| 225 | DHS5 | 6 | 2 |
| 226 | DHS6 | 0 | 2 |
| 227 | DHS7 | 3 | 1 |
| 228 | DHS8 | 3 | 1 |
| 229 | DHS9 | 3 | 9 |
| 230 | DHS10 | 3 | 0 |

TABLE 18
Results from silk of stably transformed maize plants

| SEQ ID NO | CTB | First Cassette | Second Cassette |
|---|---|---|---|
| | No CTB | 3 | 2 |
| 221 | DHS1 | 6 | 5 |
| 222 | DHS2 | 8 | No expression |
| 223 | DHS3 | 8 | 3 |
| 224 | DHS4 | 7 | 5 |
| 225 | DHS5 | 7 | 3 |
| 226 | DHS6 | 5 | 6 |
| 227 | DHS7 | 4 | 4 |
| 228 | DHS8 | 6 | 5 |
| 229 | DHS9 | 6 | 4 |
| 230 | DHS10 | 4 | 6 |

TABLE 19
Results from stalk of stably transformed maize plants

| SEQ ID NO | CTB | First Cassette | Second Cassette |
|---|---|---|---|
| | No CTB | 7 | 5 |
| 221 | DHS1 | 4 | 5 |
| 222 | DHS2 | 1 | No expression |
| 223 | DHS3 | 8 | 5 |
| 224 | DHS4 | 9 | 9 |
| 225 | DHS5 | 6 | 6 |
| 226 | DHS6 | 9 | 6 |
| 227 | DHS7 | 7 | 9 |
| 228 | DHS8 | 7 | 8 |
| 229 | DHS9 | 5 | 4 |
| 230 | DHS10 | 6 | 5 |

TABLE 20
Results from husk of stably transformed maize plants

| | CTB | First Cassette | Second Cassette |
|---|---|---|---|
| | No CTB | 0 | 3 |
| 221 | DHS1 | 3 | 2 |
| 222 | DHS2 | 5 | No expression |
| 223 | DHS3 | 4 | 5 |
| 224 | DHS4 | 4 | 6 |
| 225 | DHS5 | 3 | 4 |
| 226 | DHS6 | 3 | 3 |
| 227 | DHS7 | 2 | 4 |
| 228 | DHS8 | 1 | 1 |
| 229 | DHS9 | 1 | 4 |
| 230 | DHS10 | 4 | 3 |

TABLE 21
Results from R1 leaf of stably transformed maize plants

| | CTB | First Cassette | Second Cassette |
|---|---|---|---|
| | No CTB | 8 | 3 |
| 221 | DHS1 | 7 | 5 |
| 222 | DHS2 | 4 | No expression |
| 223 | DHS3 | 3 | 5 |
| 224 | DHS4 | 2 | 6 |
| 225 | DHS5 | 4 | 6 |
| 226 | DHS6 | 9 | 5 |
| 227 | DHS7 | 1 | 8 |
| 228 | DHS8 | 2 | 8 |
| 229 | DHS9 | 5 | 6 |
| 230 | DHS10 | 6 | 4 |

0-9 scale based on the raw data first being normalized to the respective single gene control, then ranked based on the highest and lowest values.
0 = expression is 40%-49% of the single gene control
1 = expression is 50%-59% of the single gene control
2 = expression is 60%-69% of the single gene control
3 = expression is 70%-79% of the single gene control
4 = expression is 80%-89% of the single gene control
5 = expression is 90%-99% of the single gene control
6 = expression is 100%-109% of the single gene control
7 = expression is 110%-119% of the single gene control
8 = expression is 120%-129% of the single gene control
9 = expression is ≥130% of the single gene control

Insulator Signatures from Different Species:

[0224] Known insulator sequences from public data have been and will be used to identify orthologous signatures in a plant species of interest. For example, Miklos Gaszner et al. (1999) showed enhancer blocking activity from a 24 bp sequence of the Drosophila scs element. This sequence was used to identify homologous sequences from maize, Arabidopsis and soy. The homologous sequences vary from 15 bp to 50 bp. These sequences are being evaluated in 1× and 4× copies in transient assays for CTB/CIS performance (SEQ IDS 195 to 209). Some sequences show good activity (see Table 22).

TABLE 22
Transient maize results for orthologous
signatures of SCS binding sites

| | | First | Second |
|---|---|---|---|
| SEQ ID NO | CTB | Cassette | Cassette |
| | No CTB | 4 | 4 |
| 195 | 4x AT-CYT P450 | 2 | 4 |
| 196 | 4x AT-ICGP | 5 | 5 |
| 197 | 4x AT-ITGP | 3 | 4 |
| 198 | 4x AT-PHY A | 1 | 9 |
| 199 | 4x AT-RING | 4 | 4 |
| 200 | 4x ZM-IDGP | 2 | 4 |
| 201 | 4x ZM-ICGP | 8 | 9 |
| 202 | 4x ZM-IDGP-2 | 3 | 4 |
| 203 | 4x ZM-IDGP-3 | 2 | 4 |
| 204 | 4x ZM-IDGP-4 | 1 | 0 |
| 205 | 4x GM-CYT P450 | 4 | 8 |
| 206 | 4x GM-CYT P450-2 | 6 | 8 |
| 207 | 4x GM-IDGP CTB (REV) | 3 | 4 |
| 208 | 4x GM-IDGP | 4 | 5 |
| 209 | 4x GM-CYT P450-3 | 4 | 7 |

0-9 scale based on the raw data first being normalized to the respective single gene control, then ranked based on the highest and lowest values.
0 = expression is 40%-49% of the single gene control
1 = expression is 50%-59% of the single gene control
2 = expression is 60%-69% of the single gene control
3 = expression is 70%-79% of the single gene control
4 = expression is 80%-89% of the single gene control
5 = expression is 90%-99% of the single gene control
6 = expression is 100%-109% of the single gene control
7 = expression is 110%-119% of the single gene control
8 = expression is 120%-129% of the single gene control
9 = expression is ≥130% of the single gene control

[0225] Other approaches include the following:

[0226] A 2 kb fragment from petunia, TBS (transformation booster sequence, Jean-Michel Hily et al. 2009), was analyzed for homologous sequences from different plant species and fragments ranging from 15 bp to 300 bp fragments are being evaluated (SEQ IDs 210 to 220).

[0227] CTCF (CCCTC-Binding factor) is involved in many cellular processes, including transcriptional regulation, insulator activity, V(D)J recombination and regulation of chromatin architecture.

[0228] CTCF-like motifs have been identified from Arabidopsis, soy and maize and will be evaluated in 2× to 4× copies (SEQ IDs 165 to 194) for insulator or CTB like activity. The length of the individual sequences vary from 15 bp to 30 bp. Transient evaluation of 14 sequences in 4× copies is shown in Table 23.

TABLE 23
Maize results for orthologous CTCF motif sequences

| SEQ ID NO | CTB | First Cassette | Second Cassette |
|---|---|---|---|
| | No CTB | very low expression | 0 |
| 166 | 4X ZM-CTCF-1 | 0 | 1 |
| 168 | 4X ZM-CTCF-2 | 1 | 1 |
| 170 | 4X ZM-CTCF-3 | 2 | 2 |
| 172 | 4X ZM-CTCF-4 | 5 | 4 |
| 174 | 4X ZM-CTCF-5 | 2 | 4 |
| 176 | 4X AT-DUF626 | 2 | 6 |
| 178 | 4X AT-PCD | very low expression | 9 |
| 180 | 4X AT-DZFP | 3 | 3 |
| 182 | 4X AT-SAM | 1 | 1 |
| 184 | 4X AT-DUF936 | 2 | 2 |
| 186 | 4X GM-CTCF-1 | 0 | 1 |
| 188 | 4X GM-CTCF-2 | 0 | 0 |
| 190 | 4X GM-MAT-1 | 4 | 5 |
| 192 | 4X GM-CTCF-3 | 0 | 1 |
| 194 | 4X GM-MAT-2 | 1 | 1 |

0-9 scale based on the raw data first being normalized to the respective single gene control, then ranked based on the highest and lowest values.
0 = expression is 40%-49% of the single gene control
1 = expression is 50%-59% of the single gene control
2 = expression is 60%-69% of the single gene control
3 = expression is 70%-79% of the single gene control
4 = expression is 80%-89% of the single gene control
5 = expression is 90%-99% of the single gene control
6 = expression is 100%-109% of the single gene control
7 = expression is 110%-119% of the single gene control
8 = expression is 120%-129% of the single gene control
9 = expression is ≥130% of the single gene control

### DNA/Nucleosome Modification (Epigenetic Control):

[0229] Modifications to DNA, histone, and non-histone chromosomal proteins establish a complex regulatory network that controls genome function. Chemical modifications of histones include methylation, acetylation, phosphorylation, ubiquitination, and sumoylation. These properties will be leveraged to identify or design sequences for gene regulation. For example, the property of DNA methylation, in switching gene regulation, will be leveraged to alter the properties of the DNA sequence (CTB) positioned between two neighboring genes. Experiments in progress include testing a DNA fragment predicted to be methylated. Preliminary results indicate it has CTB/CIS activity when placed between two expression cassettes in a gene stack configuration, further evaluations in progress (SEQ ID 267).

### Terminators in 2× to 4× Copies:

[0230] Terminator sequences constitute the 3′ UTR or a combination of 3′ UTR and downstream sequences of up to 1 kb. Two to four terminators can be added together to build a CTB/CIS sequence to evaluate the impact on expression characteristics of both upstream and downstream cassettes in a transgenic plant. Work using this concept has been done in rice and maize. Some of the combinations include up to 4 terminators (Table 24) showed preserved expression characteristics when placed between neighboring genes in stable rice plants (Table 25).

### Intergenic Regions Between Dense Gene Pairs:

[0231] DNA sequence between highly or equally expressed gene pairs can display CTB/CIS activity. This intergenic region, which may include the 3′ UTR, can be up to 3 kb in length. Features in the intergenic region allow the native gene pair their expression characteristics. Isolation and insertion of these types of sequences, for example, in a stacked, transgene configuration may allow for the preservation of cassette expression characteristics, as if the cassettes were independent of each other. A combination of sequences from convergent gene pairs (Table 24) showed preserved expression patterns of neighboring transgenes (Table 25). Sequences from a variety of different plant species are being isolated.

### Transcriptional Termination Signals:

[0232] Termination signal sequences, which include poly(A) addition signals, are being evaluated. Poly(A) signal strength and/or clustering of poly(A) addition sites may contribute attributes to a sequence for enhanced CTB/CIS activity. Synthetic elements can be created by combining learnings from experiments currently in progress. A set of completed experiments has tested a synthetic sequence consisting of poly(A) signal sequences from 5 terminators combined together (Table 24). Irrespective of direction, some of the combinations showed CTB/CIS activity (Table 25).

TABLE 24
Terminators, convergent gene pairs and
poly A signature sequences as CTBs

| SEQ | Vector | |
|---|---|---|
| ID NO | name/CTB | Description |
| | STV 2 | No CTB |
| | STV4 | Reporter gene1 |
| | STV5 | Reporter gene2 |
| 251 | STV6 | 3 kb coding sequence as CTB test |
| 252 | STV7 | 1.7 Kb coding sequence as CTB test |
| 253 | STV8 | Intergenic region and 3¹ UTR from Convergent gene |
| | | pair as CTB |
| 254 | STV9 | 4x terminator as CTB |
| 255 | STV10 | 4x terminator in reverse as CTB |
| 256 | STV11 | Intergenic region and 3¹ UTR from Convergent gene |
| | | pair as CTB |
| 257 | STV12 | 4x terminator as CTB |
| 258 | STV13 | 4x terminator in reverse as CTB test |
| 259 | STV14 | Intergenic region and 3¹ UTR from Convergent gene |
| | | pair as CTB |
| 260 | STV15 | 4x terminator as CTB |
| 261 | STV16 | 4x terminator in reverse as CTB test |
| 262 | STV17 | 1 Kb coding sequence as CTB test |
| 263 | STV18 | Poly A signal sequences from 5 Terminators as CTB |
| 264 | STV19 | Poly A signal sequences from 5 Terminators in |
| | | reverse as CTB test |
| 265 | STV20 | Poly A signal sequences from 5 Terminators as CTB |
| 266 | STV21 | Poly A signal sequences from 5 Terminators in |
| | | reverse as CTB test |

TABLE 25
Evaluation of Terminators, convergent gene pairs
and poly A signal sequences as CTBs in rice
stable plants. Results are from leaf tissue

| | Reporter gene 1 | Reporter gene 2 |
|---|---|---|
| | expression (%) | expression (%) |
| Vector | (upsteam cassette) | (downstream cassette) |
| STV4 | 100 | |
| STV5 | | 100 |
| STV2 | 144 | 99 |
| STV6 | 112 | 68 |
| STV7 | 122 | 94 |
| STV8 | 188 | 100 |
| STV9 | 207 | 197 |
| STV10 | 157 | 85 |
| STV11 | 286 | 192 |
| STV12 | 177 | 112 |
| STV13 | 300 | 53 |
| STV14 | 202 | 124 |
| STV15 | 206 | 154 |
| STV16 | 1 | 0.3 |
| STV17 | 277 | 126 |
| STV18 | 157 | 167 |
| STV19 | 165 | 175 |
| STV20 | 383 | 63 |
| STV21 | 337 | 533 |

CTB/CIS Regions Upstream of, or within, Promoters

[0233] Regulatory regions in promoters or 5′ flanking regions of genes can have CTB/CIS activity. These may function by binding protein, bending nucleic acids or a combination of both, thereby limiting the effect of one expression cassette on another in a plant or plant cell. Several candidates have been tested. Examples include a segment from the Sb-Gly promoter and another from the OEBF promoter (Seq ID 243 to 250). They work as duplicated copies and in combination (one Sb-GLY and one Zm-OEBF).

### Library (Genomic DNA Fragments):

[0234] A library of genomic DNA (fragments of 300 bp to 2 kb) from different plant species can be cloned between 2 genes and evaluated for CTB/CIS activity. Source material can be broad, but currently a STAR-seq library exists and sequences that provide no or limited expression enhancement can be evaluated for CTB/CIS activity.

### Example 21: Sequences

[0235] The sequence descriptions and sequence listing attached hereto comply with the rules governing nucleotide and amino acid sequence disclosures in patent applications as set forth in 37 C.F.R. §§ 1.831 through 1.835. The sequence descriptions comprise the three letter codes for amino acids as defined in 37 C.F.R. §§ 1.831 through 1.835, which are incorporated herein by reference. Variable nucleotides are indicated as: U=T # alias Uracil to Thymine (permit U in input sequences); R=AG; Y=CT; K=GT; M=AC; S=CG; W=AT; B=CGT; D=GAT; H=ACT; V=ACG; N=ACGT # wildcard symbol.

[0236] See Table 26 for sequences useful in the present disclosure.

TABLE 26
Sequence Table

| | Polynucleotide | | |
|---|---|---|---|
| SEQ | (DNA) or | | |
| ID | Polypeptide | | |
| NO: | (PRT) | NAME | DESCRIPTION |
| 1 | DNA | ZM-T1S1C1 CTB | Zea Mays DNA sequence |
| | | | ZM-T1S1C1 CTB |
| 2 | DNA | ZM-T1S2C3 CTB | Zea Mays DNA sequence |
| | | | ZM-T1S2C3 CTB |
| 3 | DNA | ZM-T1S2C3-2 CTB | Zea Mays DNA sequence |
| | | | ZM-T1S2C3-2 CTB |
| 4 | DNA | ZM-T1S2C6 CTB | Zea Mays DNA sequence |
| | | | ZM-T1S2C6 CTB |
| 5 | DNA | ZM-T1S2C7 CTB | Zea Mays DNA sequence |
| | | | ZM-T1S2C7 CTB |
| 6 | DNA | ZM-T1S2C8 CTB | Zea Mays DNA sequence |
| | | | ZM-T1S2C8 CTB |
| 7 | DNA | ZM-T1S2C9 CTB | Zea Mays DNA sequence |
| | | | ZM-T1S2C9 CTB |
| 8 | DNA | ZM-T1S2C9-2 CTB | Zea Mays DNA sequence |
| | | | ZM-T1S2C9-2 CTB |
| 9 | DNA | ZM-T1S2C1 CTB | Zea Mays DNA sequence |
| | | | ZM-T1S2C1 CTB |
| 10 | DNA | ZM-T1S6C6 CTB | Zea Mays DNA sequence |
| | | | ZM-T1S6C6 CTB |
| 11 | DNA | ZM-T1S6C1 CTB | Zea Mays DNA sequence |
| | | | ZM-T1S6C1 CTB |
| 12 | DNA | ZM-T2S1C1 CTB | Zea Mays DNA sequence |
| | | | ZM-T2S1C1 CTB |
| 13 | DNA | ZM-T2S1C3 CTB | Zea Mays DNA sequence |
| | | | ZM-T2S1C3 CTB |
| 14 | DNA | ZM-T2S1C4 CTB | Zea Mays DNA sequence |
| | | | ZM-T2S1C4 CTB |
| 15 | DNA | ZM-T2S1C5 CTB | Zea Mays DNA sequence |
| | | | ZM-T2S1C5 CTB |
| 16 | DNA | ZM-T2S2C8 CTB | Zea Mays DNA sequence |
| | | | ZM-T2S2C8 CTB |
| 17 | DNA | ZM-T2S2C9 CTB | Zea Mays DNA sequence |
| | | | ZM-T2S2C9 CTB |
| 18 | DNA | ZM-T2S2C4 CTB | Zea Mays DNA sequence |
| | | | ZM-T2S2C4 CTB |
| 19 | DNA | ZM-T2S2C4-2 CTB | Zea Mays DNA sequence |
| | | | ZM-T2S2C4-2 CTB |
| 20 | DNA | ZM-T2S2C2 CTB | Zea Mays DNA sequence |
| | | | ZM-T2S2C2 CTB |
| 21 | DNA | ZM-T2S2C3 CTB | Zea Mays DNA sequence |
| | | | ZM-T2S2C3 CTB |
| 22 | DNA | ZM-T2S2C2-2 CTB | Zea Mays DNA sequence |
| | | | ZM-T2S2C2-2 CTB |
| 23 | DNA | ZM-T2S2C2-3 CTB | Zea Mays DNA sequence |
| | | | ZM-T2S2C2-3 CTB |
| 24 | DNA | ZM-T2S2C2-4 CTB | Zea Mays DNA sequence |
| | | | ZM-T2S2C2-4 CTB |
| 25 | DNA | ZM-T2S2C7 CTB | Zea Mays DNA sequence |
| | | | ZM-T2S2C7 CTB |
| 26 | DNA | ZM-T2S2C5 CTB | Zea Mays DNA sequence |
| | | | ZM-T2S2C5 CTB |
| 27 | DNA | ZM-T2S2C5-2 CTB | Zea Mays DNA sequence |
| | | | ZM-T2S2C5-2 CTB |
| 28 | DNA | ZM-T2S2C5-3 CTB | Zea Mays DNA sequence |
| | | | ZM-T2S2C5-3 CTB |
| 29 | DNA | ZM-T2S2C5-4 CTB | Zea Mays DNA sequence |
| | | | ZM-T2S2C5-4 CTB |
| 30 | DNA | ZM-T1S1C5 CTB | Zea Mays DNA sequence |
| | | | ZM-T1S1C5 CTB |
| 31 | DNA | ZM-T1S6C5 CTB | Zea Mays DNA sequence |
| | | | ZM-T1S6C5 CTB |
| 32 | DNA | ZM-T2S1C5-2 CTB | Zea Mays DNA sequence |
| | | | ZM-T2S1C5-2 CTB |
| 33 | DNA | ZM-T2S1C5-3 CTB | Zea Mays DNA sequence |
| | | | ZM-T2S1C5-3 CTB |
| 34 | DNA | ZM-T1S6C5-2 CTB | Zea Mays DNA sequence |
| | | | ZM-T1S6C5-2 CTB |
| 35 | DNA | ZM-T2S2C5-5 CTB | Zea Mays DNA sequence |
| | | | ZM-T2S2C5-5 CTB |
| 36 | DNA | INS1 | Arabidopsis thaliana DNA sequence Cross-talk blocker |
| | | | sequence INS1 from region upstream of AT-4G15300 |
| 37 | DNA | INS2 | Arabidopsis thaliana DNA sequence Cross-talk blocker |
| | | | sequence INS2 from region upstream of AT-4G15300 |
| 38 | DNA | INS3 | Arabidopsis thaliana DNA sequence Cross-talk blocker |
| | | | sequence INS3 from region upstream of AT-4G15300 |
| 39 | DNA | INS4 | Arabidopsis thaliana DNA sequence Cross-talk blocker |
| | | | sequence INS4 from region upstream of AT-4G15300 |
| 40 | DNA | INS5 | Arabidopsis thaliana DNA sequence Cross-talk blocker |
| | | | sequence INS5 from region upstream of AT-4G15280 |
| 41 | DNA | INS6 | Arabidopsis thaliana DNA sequence Cross-talk blocker |
| | | | sequence INS6 from region upstream of AT-4G15280 |
| 42 | DNA | INS7 | Arabidopsis thaliana DNA sequence Cross-talk blocker |
| | | | sequence INS7 from region upstream of AT-4G15280 |
| 43 | DNA | INS8 | Arabidopsis thaliana DNA sequence Cross-talk blocker |
| | | | sequence INS8 from region upstream of AT-4G15280 |
| 44 | DNA | INS9 | Arabidopsis thaliana DNA sequence Cross-talk blocker |
| | | | sequence INS9 from region upstream of AT-1G60140 |
| 45 | DNA | INS10 | Arabidopsis thaliana DNA sequence Cross-talk blocker |
| | | | sequence INS10 from region upstream of AT-1G60140 |
| 46 | DNA | INS11 | Arabidopsis thaliana DNA sequence Cross-talk blocker |
| | | | sequence INS11 from region upstream of AT-1G60140 |
| 47 | DNA | INS12 | Arabidopsis thaliana DNA sequence Cross-talk blocker |
| | | | sequence INS12 from region upstream of AT-1G60140 |
| 48 | DNA | INS24 | Arabidopsis thaliana DNA sequence Cross-talk blocker |
| | | | sequence INS24 from region upstream of AT-4G15290 |
| 49 | DNA | INS25 | Arabidopsis thaliana DNA sequence Cross-talk blocker |
| | | | sequence INS25 from region upstream of AT-4G15290 |
| 50 | DNA | INS26 | Arabidopsis thaliana DNA sequence Cross-talk blocker |
| | | | sequence INS26 from region upstream of AT-4G15290 |
| 51 | DNA | INS27 | Arabidopsis thaliana DNA sequence Cross-talk blocker |
| | | | sequence INS27 from region upstream of AT-4G15290 |
| 52 | DNA | INS13 | Artificial DNA sequence Cross-talk blocker sequence |
| | | (AT-5-IV-8) | INS13 comprising 5 motifs from AT-5-IV-7 |
| 53 | DNA | AT-5-IV-2 INS | Arabidopsis thaliana DNA sequence AT-5-IV-2 INS |
| 54 | DNA | AT-5-IV-7 INS | Arabidopsis thaliana DNA sequence AT-5-IV-7 INS |
| 55 | DNA | AT-14-II-2 INS | Arabidopsis thaliana DNA sequence AT-14-II-2 INS |
| 56 | DNA | AT-5-IV-2 INS | Arabidopsis thaliana DNA sequence AT-5-IV-2 INS |
| | | (DEL1) | (DEL1) |
| 57 | DNA | AT-5-IV-2 INS | Arabidopsis thaliana DNA sequence AT-5-IV-2 INS |
| | | (DEL2) | (DEL2) |
| 59 | DNA | AT-5-IV-2 INS | Arabidopsis thaliana DNA sequence AT-5-IV-2 INS |
| | | (DEL3) | (DEL3) |
| 59 | DNA | AT-5-IV-2 INS | Arabidopsis thaliana DNA sequence AT-5-IV-2 INS |
| | | (DEL4) | (DEL4) |
| 60 | DNA | AT-5-IV-2 INS | Arabidopsis thaliana DNA sequence AT-5-IV-2 INS |
| | | (DEL5) | (DEL5) |
| 61 | DNA | AT-5-IV-2 INS | Arabidopsis thaliana DNA sequence AT-5-IV-2 INS |
| | | (DEL6)) | (DEL6) |
| 62 | DNA | AT-5-IV-2 (DEL7) | Arabidopsis thaliana DNA sequence AT-5-IV-2 (DEL7) |
| 63 | DNA | AT-5-IV-2 (DEL8) | Arabidopsis thaliana DNA sequence AT-5-IV-2 (DEL8) |
| 64 | DNA | AT-5-IV-7A | Arabidopsis thaliana DNA sequence AT-5-IV-7A |
| 65 | DNA | AT-5-IV-7B | Arabidopsis thaliana DNA sequence AT-5-IV-7B |
| 66 | DNA | AT-5-IV-7C | Arabidopsis thaliana DNA sequence AT-5-IV-7C |
| 67 | DNA | EE3334 (COMP) | Arabidopsis thaliana DNA sequence EE3334 (COMP) |
| 68 | DNA | AT-5-IV-7D | Arabidopsis thaliana DNA sequence AT-5-IV-7D |
| 69 | DNA | ZM_CTB_T1S1C5_35 | Zea Mays DNA sequence ZM_CTB_T1S1C5_35 |
| 70 | DNA | ZM_CTB_T1S1C7_36 | Zea Mays DNA sequence ZM_CTB_T1S1C7_36 |
| 71 | DNA | ZM_CTB_T1S1C2_38 | Zea Mays DNA sequence ZM_CTB_T1S1C7_37 |
| 72 | DNA | ZM_CTB_T1S1C2_38 | Zea Mays DNA sequence ZM_CTB_T1S1C2_38 |
| 73 | DNA | ZM_CTB_T1S1C7_39 | Zea Mays DNA sequence ZM_CTB_T1S1C7_39 |
| 74 | DNA | ZM_CTB_T1S1C9_40 | Zea Mays DNA sequence ZM_CTB_T1S1C9_40 |
| 75 | DNA | ZM_CTB_T1S2C7_41 | Zea Mays DNA sequence ZM_CTB_T1S2C7_41 |
| 76 | DNA | ZM_CTB_T1S2C6_42 | Zea Mays DNA sequence ZM_CTB_T1S2C6_42 |
| 77 | DNA | ZM_CTB_T1S2C4_43 | Zea Mays DNA sequence ZM_CTB_T1S2C4_43 |
| 78 | DNA | ZM_CTB_T1S2C5_44 | Zea Mays DNA sequence ZM_CTB_T1S2C5_44 |
| 79 | DNA | ZM_CTB_T1S2C6_45 | Zea Mays DNA sequence ZM_CTB_T1S2C6_45 |
| 80 | DNA | ZM_CTB_T1S2C1_46 | Zea Mays DNA sequence ZM_CTB_T1S2C1_46 |
| 81 | DNA | ZM_CTB_T1S2C10_47 | Zea Mays DNA sequence ZM_CTB_T1S2C10_47 |
| 82 | DNA | ZM_CTB_T1S2C5_48 | Zea Mays DNA sequence ZM_CTB_T1S2C5_48 |
| 83 | DNA | ZM_CTB_T1S2C1_49 | Zea Mays DNA sequence ZM_CTB_T1S2C1_49 |
| 84 | DNA | ZM_CTB_T1S3C8_50 | Zea Mays DNA sequence ZM_CTB_T1S3C8_50 |
| 85 | DNA | ZM_CTB_T1S3C1_51 | Zea Mays DNA sequence ZM_CTB_T1S3C1_51 |
| 86 | DNA | ZM_CTB_T1S3C1_52 | Zea Mays DNA sequence ZM_CTB_T1S3C1_52 |
| 87 | DNA | ZM_CTB_T1S3C5_53 | Zea Mays DNA sequence ZM_CTB_T1S3C5_53 |
| 88 | DNA | ZM_CTB_T1S3C1_54 | Zea Mays DNA sequence ZM_CTB_T1S3C1_54 |
| 89 | DNA | ZM_CTB_T1S3C1_55 | Zea Mays DNA sequence ZM_CTB_T1S3C1_55 |
| 91 | DNA | ZM_CTB_T1S3C3_56 | Zea Mays DNA sequence ZM_CTB_T1S3C3_56 |
| 91 | DNA | ZM_CTB_T1S3C10_57 | Zea Mays DNA sequence ZM_CTB_T1S3C10_57 |
| 92 | DNA | ZM_CTB_T1S3C5_58 | Zea Mays DNA sequence ZM_CTB_T1S3C5_58 |
| 93 | DNA | ZM_CTB_T1S3C3_59 | Zea Mays DNA sequence ZM_CTB_T1S3C3_59 |
| 94 | DNA | ZM_CTB_T1S5C9_60 | Zea Mays DNA sequence ZM_CTB_T1S5C9_60 |
| 95 | DNA | ZM_CTB_T1S5C7_61 | Zea Mays DNA sequence ZM_CTB_T1S5C7_61 |
| 96 | DNA | ZM_CTB_T1S6C3_62 | Zea Mays DNA sequence ZM_CTB_T1S6C3_62 |
| 97 | DNA | ZM_CTB_T1S6C2_63 | Zea Mays DNA sequence ZM_CTB_T1S6C2_63 |
| 98 | DNA | ZM_CTB_T1S6C7_64 | Zea Mays DNA sequence ZM_CTB_T1S6C7_64 |
| 99 | DNA | ZM_CTB_T1S6C1_66 | Zea Mays DNA sequence ZM_CTB_T1S6C1_66 |
| 100 | DNA | ZM_CTB_T1S6C8_67 | Zea Mays DNA sequence ZM_CTB_T1S6C8_67 |
| 101 | DNA | ZM_CTB_T1S6C6_68 | Zea Mays DNA sequence ZM_CTB_T1S6C6_68 |
| 102 | DNA | ZM_CTB_T1S6C8_69 | Zea Mays DNA sequence ZM_CTB_T1S6C8_69 |
| 103 | DNA | ZM_CTB_T2S1C1_70 | Zea Mays DNA sequence ZM_CTB_T2S1C1_70 |
| 104 | DNA | ZM_CTB_T2S1C9_71 | Zea Mays DNA sequence ZM_CTB_T2S1C9_71 |
| 105 | DNA | ZM_CTB_T2S1C5_72 | Zea Mays DNA sequence ZM_CTB_T2S1C5_72 |
| 106 | DNA | ZM_CTB_T2S1C9_73 | Zea Mays DNA sequence ZM_CTB_T2S1C9_73 |
| 107 | DNA | ZM_CTB_T2S1C2_74 | Zea Mays DNA sequence ZM_CTB_T2S1C2_74 |
| 108 | DNA | ZM_CTB_T2S1C1_75 | Zea Mays DNA sequence ZM_CTB_T2S1C1_75 |
| 109 | DNA | ZM_CTB_T2S1C1_77 | Zea Mays DNA sequence ZM_CTB_T2S1C1_77 |
| 110 | DNA | ZM_CTB_T2S1C6_78 | Zea Mays DNA sequence ZM_CTB_T2S1C6_78 |
| 111 | DNA | ZM_CTB_T2S1C6_79 | Zea Mays DNA sequence ZM_CTB_T2S1C6_79 |
| 112 | DNA | ZM_CTB_T2S1C3_80 | Zea Mays DNA sequence ZM_CTB_T2S1C3_80 |
| 113 | DNA | ZM_CTB_T2S1C1_81 | Zea Mays DNA sequence ZM_CTB_T2S1C1_81 |
| 114 | DNA | ZM_CTB_T2S1C1_82 | Zea Mays DNA sequence ZM_CTB_T2S1C1_82 |
| 115 | DNA | ZM_CTB_T2S1C2_83 | Zea Mays DNA sequence ZM_CTB_T2S1C2_83 |
| 116 | DNA | ZM_CTB_T2S1C1_84 | Zea Mays DNA sequence ZM_CTB_T2S1C1_84 |
| 117 | DNA | ZM_CTB_T2S2C9_85 | Zea Mays DNA sequence ZM_CTB_T2S2C9_85 |
| 118 | DNA | ZM_CTB_T2S2C9_86 | Zea Mays DNA sequence ZM_CTB_T2S2C9_86 |
| 119 | DNA | ZM_CTB_T2S2C4_87 | Zea Mays DNA sequence ZM_CTB_T2S2C4_87 |
| 120 | DNA | ZM_CTB_T2S2C7_88 | Zea Mays DNA sequence ZM_CTB_T2S2C7_88 |
| 120 | DNA | ZM_CTB_T2S2C5_89 | Zea Mays DNA sequence ZM_CTB_T2S2C5_89 |
| 122 | DNA | ZM_CTB_T2S2C4_90 | Zea Mays DNA sequence ZM_CTB_T2S2C4_90 |
| 123 | DNA | ZM_CTB_T2S2C1_91 | Zea Mays DNA sequence ZM_CTB_T2S2C1_91 |
| 124 | DNA | ZM_CTB_T2S2C8_92 | Zea Mays DNA sequence ZM_CTB_T2S2C8_92 |
| 125 | DNA | ZM_CTB_T2S2C1_93 | Zea Mays DNA sequence ZM_CTB_T2S2C1_93 |
| 126 | DNA | ZM_CTB_T2S2C5_94 | Zea Mays DNA sequence ZM_CTB_T2S2C5_94 |
| 127 | DNA | ZM_CTB_T2S2C1_95 | Zea Mays DNA sequence ZM_CTB_T2S2C1_95 |
| 128 | DNA | ZM_CTB_T2S2C9_97 | Zea Mays DNA sequence ZM_CTB_T2S2C9_97 |
| 129 | DNA | ZM_CTB_T2S2C5_98 | Zea Mays DNA sequence ZM_CTB_T2S2C5_98 |
| 130 | DNA | ZM_CTB_T2S2C7_99 | Zea Mays DNA sequence ZM_CTB_T2S2C7_99 |
| 131 | DNA | ZM_CTB_T2S2C1_100 | Zea Mays DNA sequence ZM_CTB_T2S2C1_100 |
| 132 | DNA | AT-5-III-1 | Arabidopsis DNA sequence |
| | | | AT-5-III-1 |
| 133 | DNA | Motif Sequence 1 | Artificial DNA sequence |
| | | | Motif Sequence 1 |
| 134 | DNA | Motif Sequence 2 | Artificial DNA sequence |
| | | | Motif Sequence 2 |
| 135 | DNA | Motif Sequence 4 | Artificial DNA sequence |
| | | | Motif Sequence 4 |
| 136 | DNA | Motif Sequence 5 | Artificial DNA sequence |
| | | | Motif Sequence 5 |
| 137 | DNA | Motif Sequence 6 | Artificial DNA sequence |
| | | | Motif Sequence 6 |
| 138 | DNA | Motif Sequence 7 | Artificial DNA sequence |
| | | | Motif Sequence 7 |
| 139 | DNA | Motif Sequence 10 | Artificial DNA sequence |
| | | | Motif Sequence 10 |
| 140 | DNA | Motif Sequence 11 | Artificial DNA sequence |
| | | | Motif Sequence 11 |
| 141 | DNA | Motif Sequence 18 | Artificial DNA sequence |
| | | | Motif Sequence 18 |
| 142 | DNA | CTB vector depicted | Artificial DNA sequence for the CTB vector depicted in |
| | | in FIG. 5 | FIG. 5 |
| 143 | DNA | CTB vector depicted | Artificial DNA sequence for the CTB vector depicted in |
| | | in FIG. 6 | FIG. 6 |
| 144 | DNA | CTB vector depicted | Artificial DNA sequence for the CTB vector depicted in |
| | | in FIG. 7 | FIG. 7 |
| 145 | DNA | PHP96034 | RB + LOXP + AT-5-IV-2 INS + ZM-HSP17.7 PRO::MO- |
| | | | CRE EXON1::ST-LS1 INTRON2::MO-CRE |
| | | | EXON2::PINII TERM + AT-5-IV-2 INS + NOS PRO::ZM- |
| | | | WUS2::IN2 TERM + FMV ENHANCER + PCSV ENH + |
| | | | MMV ENH + UBI1ZM PRO::UBI1ZM 5UTR::UBI1ZM |
| | | | INTRON1::ZM-ODP2::OS-T28 TERM + LOXP + SB-UBI |
| | | | PRO::SB-UBI INTRON1::ZSGREEN1::OS-UBI TERM + |
| | | | SB-ALS PRO::ZM-ALS::SB-UBI TERM + LB |
| 146 | DNA | PHP101513 | RB + LOXP + AT-5-IV-2 INS + ZM-HSP17.7 PRO::MO- |
| | | | CRE EXON1::ST-LS1 INTRON2::MO-CRE |
| | | | EXON2::PINII TERM + ZM-T1S1C1 CTB + NOS |
| | | | PRO::ZM-WUS2::IN2 TERM + FMV ENHANCER + |
| | | | PCSV ENH + MMV ENH + UBI1ZM PRO::UBI1ZM |
| | | | 5UTR::UBI1ZM INTRON1::ZM-ODP2::OS-T28 TERM + |
| | | | LOXP + SB-UBI PRO::SB-UBI INTRON1:: |
| | | | ZSGREEN1::OS-UBI TERM + SB-ALS PRO::ZM- |
| | | | ALS::SB-UBI TERM + LB |
| 147 | DNA | PHP101514 | RB + LOXP + AT-5-IV-2 INS + ZM-HSP17.7 PRO::MO- |
| | | | CRE EXON1::ST-LS1 INTRON2::MO-CRE |
| | | | EXON2::PINII TERM + ZM- T1S2C3 CTB + NOS |
| | | | PRO::ZM-WUS2::IN2 TERM + FMV ENHANCER + |
| | | | PCSV ENH + MMV ENH + UBI1ZM PRO::UBI1ZM |
| | | | 5UTR::UBI1ZM INTRON1::ZM-ODP2::OS-T28 TERM + |
| | | | LOXP + SB-UBI PRO::SB-UBI INTRON1:: |
| | | | ZSGREEN1::OS-UBI TERM + SB-ALS PRO::ZM- |
| | | | ALS::SB-UBI TERM + LB |
| 148 | DNA | PHP101652 | RB + LOXP + AT-5-IV-2 INS + ZM-HSP17.7 PRO::MO- |
| | | | CRE EXON1::ST-LS1 INTRON2::MO-CRE |
| | | | EXON2::PINII TERM + ZM- T1S2C8 CTB + NOS |
| | | | PRO::ZM-WUS2::IN2 TERM + FMV ENHANCER + |
| | | | PCSV ENH + MMV ENH + UBI1ZM PRO::UBI1ZM |
| | | | 5UTR::UBI1ZM INTRON1::ZM-ODP2::OS-T28 TERM + |
| | | | LOXP + SB-UBI PRO::SB-UBI INTRON1:: |
| | | | ZSGREEN1::OS-UBI TERM + SB-ALS PRO::ZM- |
| | | | ALS::SB-UBI TERM + LB |
| 149 | DNA | PHP101653 | RB + LOXP + AT-5-IV-2 INS + ZM-HSP17.7 PRO::MO- |
| | | | CRE EXON1::ST-LS1 INTRON2::MO-CRE |
| | | | EXON2::PINII TERM + ZM- T1S2C9 CTB + NOS |
| | | | PRO::ZM-WUS2::IN2 TERM + FMV ENHANCER + |
| | | | PCSV ENH + MMV ENH + UBI1ZM PRO::UBI1ZM |
| | | | 5UTR::UBI1ZM INTRON1::ZM-ODP2::OS-T28 TERM + |
| | | | LOXP + SB-UBI PRO::SB-UBI INTRON1:: |
| | | | ZSGREEN1::OS-UBI TERM + SB-ALS PRO::ZM- |
| | | | ALS::SB-UBI TERM + LB |
| 150 | DNA | PHP101654 | RB + LOXP + AT-5-IV-2 INS + ZM-HSP17.7 PRO::MO- |
| | | | CRE EXON1::ST-LS1 INTRON2::MO-CRE |
| | | | EXON2::PINII TERM + ZM- T2S2C9 CTB + NOS |
| | | | PRO::ZM-WUS2::IN2 TERM + FMV ENHANCER + |
| | | | PCSV ENH + MMV ENH + UBI1ZM PRO::UBI1ZM |
| | | | 5UTR::UBI1ZM INTRON1::ZM-ODP2::OS-T28 TERM + |
| | | | LOXP + SB-UBI PRO::SB-UBI INTRON1:: |
| | | | ZSGREEN1::OS-UBI TERM + SB-ALS PRO::ZM- |
| | | | ALS::SB-UBI TERM + LB |
| 151 | DNA | PHP97883 | RB + LOXP + NOS PRO::ZM-WUS2::IN2 TERM + FMV |
| | | | ENHANCER + PCSV ENH + MMV ENH + UBI1ZM |
| | | | PRO::UBI1ZM 5UTR::UBI1ZM INTRON1::ZM- |
| | | | ODP2::OS-T28 TERM + ZM-HSP17.7 PRO::MO-CRE |
| | | | EXON1::ST-LS1 INTRON2::MO-CRE EXON2::PINII |
| | | | TERM + LOXP + SB-UBI PRO::SB-UBI INTRON1:: |
| | | | ZSGREEN1::OS-UBI TERM + SB-ALS PRO::ZM- |
| | | | ALS::SB-UBI TERM + LB |
| 152 | DNA | PHP96037 | RB + LOXP + NOS PRO::ZM-WUS2::IN2 TERM + FMV |
| | | | ENHANCER + PCSV ENH + MMV ENH + UBI1ZM |
| | | | PRO::UBI1ZM 5UTR::UBI1ZM INTRON1::ZM- |
| | | | ODP2::OS-T28 TERM + AT-5-IV-2 INS + ZM-HSP17.7 |
| | | | PRO::MO-CRE EXON1::ST-LS1 INTRON2::MO-CRE |
| | | | EXON2::PINII TERM + AT-5-IV-2 INS + LOXP + SB- |
| | | | UBI PRO::SB-UBI INTRON1::ZSGREEN1::OS-UBI |
| | | | TERM + SB-ALS PRO::ZM-ALS::SB-UBI TERM + LB |
| 153 | DNA | PHP101595 | RB + LOXP + NOS PRO::ZM-WUS2::IN2 TERM + FMV |
| | | | ENHANCER + PCSV ENH + MMV ENH + UBI1ZM |
| | | | PRO::UBI1ZM 5UTR::UBI1ZM INTRON1::ZM- |
| | | | ODP2::OS-T28 TERM + AT-4G15300-I INS + ZM- |
| | | | HSP17.7 PRO::MO-CRE EXON1::ST-LS1 |
| | | | INTRON2::MO-CRE EXON2::PINII TERM + LOXP + |
| | | | SB-UBI PRO::SB-UBI INTRON1::ZSGREEN1::OS-UBI |
| | | | TERM + SB-ALS PRO::ZM-ALS::SB-UBI TERM + LB |
| 154 | DNA | PHP101271 | RB + LOXP + NOS PRO::ZM-WUS2::IN2 TERM + FMV |
| | | | ENHANCER + PCSV ENH + MMV ENH + UBI1ZM |
| | | | PRO::UBI1ZM 5UTR::UBI1ZM INTRON1::ZM- |
| | | | ODP2::OS-T28 TERM + AT-4G15300-II INS + ZM- |
| | | | HSP17.7 PRO::MO-CRE EXON1::ST-LS1 |
| | | | INTRON2::MO-CRE EXON2::PINII TERM + LOXP + |
| | | | SB-UBI PRO::SB-UBI INTRON1::ZSGREEN1::OS-UBI |
| | | | TERM + SB-ALS PRO::ZM-ALS::SB-UBI TERM + LB |
| 155 | DNA | PHP101811 | RB + LOXP + NOS PRO::ZM-WUS2::IN2 TERM + FMV |
| | | | ENHANCER + PCSV ENH + MMV ENH + UBI1ZM |
| | | | PRO::UBI1ZM 5UTR::UBI1ZM INTRON1::ZM- |
| | | | ODP2::OS-T28 TERM + AT-4G15300-IV INS + ZM- |
| | | | HSP17.7 PRO::MO-CRE EXON1::ST-LS1 |
| | | | INTRON2::MO-CRE EXON2::PINII TERM + LOXP + |
| | | | SB-UBI PRO::SB-UBI INTRON1::ZSGREEN1::OS-UBI |
| | | | TERM + SB-ALS PRO::ZM-ALS::SB-UBI TERM + LB |
| 156 | DNA | PHP101272 | RB + LOXP + NOS PRO: ZM-WUS2::IN2 TERM + FMV |
| | | | ENHANCER + PCSV ENH + MMV ENH + UBI1ZM |
| | | | PRO::UBI1ZM 5UTR::UBI1ZM INTRON1::ZM- |
| | | | ODP2::OS-T28 TERM + AT-4G15280-II INS + ZM- |
| | | | HSP17.7 PRO::MO-CRE EXON1::ST-LS1 |
| | | | INTRON2::MO-CRE EXON2::PINII TERM + LOXP + |
| | | | SB-UBI PRO::SB-UBI INTRON1::ZSGREEN1::OS-UBI |
| | | | TERM + SB-ALS PRO::ZM-ALS::SB-UBI TERM + LB |
| 157 | DNA | PHP101596 | RB + LOXP + NOS PRO::ZM-WUS2::IN2 TERM + FMV |
| | | | ENHANCER + PCSV ENH + MMV ENH + UBI1ZM |
| | | | PRO::UBI1ZM 5UTR::UBI1ZM INTRON1::ZM- |
| | | | ODP2::OS-T28 TERM + AT-1G60140-I INS + ZM- |
| | | | HSP17.7 PRO::MO-CRE EXON1::ST-LS1 |
| | | | INTRON2::MO-CRE EXON2::PINII TERM + LOXP + |
| | | | SB-UBI PRO::SB-UBI INTRON1::ZSGREEN1::OS-UBI |
| | | | TERM + SB-ALS PRO::ZM-ALS::SB-UBI TERM + LB |
| 158 | DNA | PHP101512 | RB + LOXP + NOS PRO::ZM-WUS2::IN2 TERM + FMV |
| | | | ENHANCER + PCSV ENH + MMV ENH + UBI1ZM |
| | | | PRO::UBI1ZM 5UTR::UBI1ZM INTRON1::ZM- |
| | | | ODP2::OS-T28 TERM + AT-4G15290-I INS + ZM- |
| | | | HSP17.7 PRO::MO-CRE EXON1::ST-LS1 |
| | | | INTRON2::MO-CRE EXON2::PINII TERM + LOXP + |
| | | | SB-UBI PRO::SB-UBI INTRON1::ZSGREEN1::OS-UBI |
| | | | TERM + SB-ALS PRO::ZM-ALS::SB-UBI TERM + LB |
| 159 | DNA | PHP101597 | RB + LOXP + NOS PRO::ZM-WUS2::IN2 TERM + FMV |
| | | | ENHANCER + PCSV ENH + MMV ENH + UBI1ZM |
| | | | PRO::UBI1ZM 5UTR::UBI1ZM INTRON1::ZM- |
| | | | ODP2::OS-T28 TERM + AT-4G15290-IV INS + ZM- |
| | | | HSP17.7 PRO::MO-CRE EXON1::ST-LS1 |
| | | | INTRON2::MO-CRE EXON2::PINII TERM + LOXP + |
| | | | SB-UBI PRO::SB-UBI INTRON1::ZSGREEN1::OS-UBI |
| | | | TERM + SB-ALS PRO::ZM-ALS::SB-UBI TERM + LB |
| 160 | DNA | PHP101308 | RB + LOXP + NOS PRO::ZM-WUS2::IN2 TERM + FMV |
| | | | ENHANCER + PCSV ENH + MMV ENH + UBI1ZM |
| | | | PRO::UBI1ZM 5UTR::UBI1ZM INTRON1::ZM- |
| | | | ODP2::OS-T28 TERM + ZM-T2S2C8 CTB + ZM-HSP17.7 |
| | | | PRO::MO-CRE EXON1::ST-LS1 INTRON2::MO-CRE |
| | | | EXON2::PINII TERM + LOXP + SB-UBI PRO::SB-UBI |
| | | | INTRON1::ZSGREEN1::OS-UBI TERM + SB-ALS |
| | | | PRO::ZM-ALS::SB-UBI TERM + LB |
| 161 | DNA | PHP101206 | RB + LOXP + NOS PRO::ZM-WUS2::IN2 TERM + FMV |
| | | | ENHANCER + PCSV ENH + MMV ENH + UBI1ZM |
| | | | PRO::UBI1ZM 5UTR::UBI1ZM INTRON1::ZM- |
| | | | ODP2::OS-T28 TERM + ZM-T2S2C2-4 CTB + ZM- |
| | | | HSP17.7 PRO::MO-CRE EXON1::ST-LS1 |
| | | | INTRON2::MO-CRE EXON2::PINII TERM + LOXP + |
| | | | SB-UBI PRO::SB-UBI INTRON1::ZSGREEN1::OS-UBI |
| | | | TERM + SB-ALS PRO::ZM-ALS::SB-UBI TERM + LB |
| 162 | DNA | PHP101207 | RB + LOXP + NOS PRO::ZM-WUS2::IN2 TERM + FMV |
| | | | ENHANCER + PCSV ENH + MMV ENH + UBI1ZM |
| | | | PRO::UBI1ZM 5UTR::UBI1ZM INTRON1::ZM- |
| | | | ODP2::OS-T28 TERM + ZM-T2S2C5 CTB + ZM-HSP17.7 |
| | | | PRO::MO-CRE EXON1::ST-LS1 INTRON2::MO-CRE |
| | | | EXON2::PINII TERM + LOXP + SB-UBI PRO::SB-UBI |
| | | | INTRON1::ZSGREEN1::OS-UBI TERM + SB-ALS |
| | | | PRO::ZM-ALS::SB-UBI TERM + LB |
| 163 | DNA | PHP101205 | RB + LOXP + NOS PRO::ZM-WUS2::IN2 TERM + FMV |
| | | | ENHANCER + PCSV ENH + MMV ENH + UBI1ZM |
| | | | PRO::UBI1ZM 5UTR::UBI1ZM INTRON1::ZM- |
| | | | ODP2::OS-T28 TERM + ZM-T1S2C9-2 CTB + ZM- |
| | | | HSP17.7 PRO::MO-CRE EXON1::ST-LS1 |
| | | | INTRON2::MO-CRE EXON2::PINII TERM + LOXP + |
| | | | SB-UBI PRO::SB-UBI INTRON1::ZSGREEN1::OS-UBI |
| | | | TERM + SB-ALS PRO::ZM-ALS::SB-UBI TERM + LB |
| 164 | DNA | PHP101094 | RB + LOXP + NOS PRO::ZM-WUS2::IN2 TERM + FMV |
| | | | ENHANCER + PCSV ENH + MMV ENH + UBI1ZM |
| | | | PRO::UBI1ZM 5UTR::UBI1ZM INTRON1::ZM- |
| | | | ODP2::OS-T28 TERM + ZM-T1S6C6 CTB + ZM-HSP17.7 |
| | | | PRO::MO-CRE EXON1::ST-LS1 INTRON2::MO-CRE |
| | | | EXON2::PINII TERM + LOXP + SB-UBI PRO::SB-UBI |
| | | | INTRON1::ZSGREEN1::OS-UBI TERM + SB-ALS |
| | | | PRO::ZM-ALS::SB-UBI TERM + LB |
| 165 | DNA | ZM-CTCF-1 CTB | A sequence with homology to CTCF-binding sites for |
| | | | CCCTC-binding factor which can function as a cross-talk |
| | | | blocker, blocking enhancer-promoter interaction. Found in |
| | | | Zea mays inbred line B73 on chromosome 4 located from |
| | | | 2660153 to 2660171. |
| 166 | DNA | 4X ZM-CTCF-1 | 4X multimerization of ZM-CTCF-1 CTB, a cross talk |
| | | (BZP1) | blocker from Zea mays with homology to CTCF-binding |
| | | | sites for CCCTC-binding factor. A unique 10 bp spacer is |
| | | | between each CTB. |
| 167 | DNA | ZM-CTCF-2 CTB | A sequence from Zea mays with homology to CTCF- |
| | | | binding sites for CCCTC-binding factor which can function |
| | | | as a cross-talk blocker, blocking enhancer-promoter |
| | | | interaction. |
| 168 | DNA | 4X ZM-CTCF-2 | 4X multimerization of CTCF-2 CTB, a cross talk blocker |
| | | (BZP1) | from Zea mays with homology to CTCF-binding sites for |
| | | | CCCTC-binding factor. A unique 10 bp spacer is between |
| | | | each CTB. |
| 169 | DNA | ZM-CTCF-3 CTB | A sequence from Zea mays with homology to CTCF- |
| | | | binding sites for which can function as a cross-talk blocker, |
| | | | blocking enhancer-promoter interaction.. |
| 170 | DNA | 4X ZM-CTCF-3 | 4X multimerization of ZM-CTCF-3 CTB, a cross talk |
| | | (BZP1) | blocker from Zea mays with homology to CTCF-binding |
| | | | sites for CCCTC-binding factor. A unique 10 bp spacer is |
| | | | between each CTB. |
| 171 | DNA | ZM-CTCF-4 CTB | A sequence from Zea mays with homology to CTCF- |
| | | | binding sites for CCCTC-binding factor which can function |
| | | | as a cross-talk blocker, blocking enhancer-promoter |
| | | | interaction. |
| 172 | DNA | 4X ZM-CTCF-4 | 4X multimerization of ZM-CTCF-4 CTB, a cross talk |
| | | (BZP1) | blocker from Zea mays with homology to CTCF-binding |
| | | | sites for CCCTC-binding factor. A unique 10 bp spacer is |
| | | | between each CTB. |
| 173 | DNA | ZM-CTCF-5 CTB | A sequence from Zea mays with homology to CTCF- |
| | | | binding sites for CCCTC-binding factor which can function |
| | | | as a cross-talk blocker, blocking enhancer-promoter |
| | | | interaction. |
| 174 | DNA | 4X ZM-CTCF-5 | 4X multimerization of ZM-CTCF-5 CTB, a cross talk |
| | | (BZP1) | blocker from Zea mays with homology to CTCF-binding |
| | | | sites for CCCTC-binding factor. A unique 10 bp spacer is |
| | | | between each CTB. |
| 175 | DNA | AT-DUF626 CTB | A sequence from Arabidopsis thaliana with homology to |
| | | | CTCF-binding sites for CCCTC-binding factor which can |
| | | | function as a cross-talk blocker, blocking enhancer- |
| | | | promoter interaction. |
| 176 | DNA | 4X AT-DUF626 | 4X multimerization of AT-DUF626 CTB, a cross talk |
| | | (BZP1) | blocker found in a protein with unknown function |
| | | | (DUF626) in Arabidopsis thaliana with homology to CTCF- |
| | | | binding sites for CCCTC-binding factor. A unique 10 bp |
| | | | spacer is between each CTB. |
| 177 | DNA | AT-PCD CTB | A sequence with homology to CTCF-binding sites for |
| | | | CCCTC-binding factor which can function as a cross-talk |
| | | | blocker, blocking enhancer-promoter interaction. Found in |
| | | | Arabidopsis thaliana polyketide cyclase/dehydrase gene on |
| | | | chromosome 1 from 5157810 to 5157828, reference |
| | | | sequence AT1G14950.1. |
| 178 | DNA | 4X AT-PCD (BZP1) | 4X multimerization of AT-PCD CTB, a cross talk blocker |
| | | | found in polyketide cyclase/dehydrase gene in Arabidopsis |
| | | | thaliana with homology to CTCF-binding sites for CCCTC- |
| | | | binding factor. A unique 10 bp spacer is between each CTB. |
| 179 | DNA | AT-DZFP CTB | A sequence from Arabidopsis thaliana with homology to |
| | | | CTCF-binding sites for CCCTC-binding factor which can |
| | | | function as a cross-talk blocker, blocking enhancer- |
| | | | promoter interaction. |
| 180 | DNA | 4X AT-DZFP (BZP1) | 4X multimerization of AT-DZFP CTB, a cross talk blocker |
| | | | found in a dof-type zinc finger DNA-binding protein in |
| | | | Arabidopsis thaliana with homology to CTCF-binding sites |
| | | | for CCCTC-binding factor. A unique 10 bp spacer is |
| | | | between each CTB. |
| 181 | DNA | AT-SAM CTB | A sequence from Arabidopsis thaliana with homology to |
| | | | CTCF-binding sites for CCCTC-binding factor which can |
| | | | function as a cross-talk blocker, blocking enhancer- |
| | | | promoter interaction. |
| 182 | DNA | 4X AT-SAM (BZP1) | 4X multimerization of AT-SAM CTB, a cross talk blocker |
| | | | found in S-adenosyl-L-methionine-dependent |
| | | | methyltransferase gene in Arabidopsis thaliana with |
| | | | homology to CTCF-binding sites for CCCTC-binding |
| | | | factor. A unique 10 bp spacer is between each CTB. |
| 183 | DNA | AT-DUF936 CTB | A sequence from Arabidopsis thaliana with homology to |
| | | | CTCF-binding sites for CCCTC-binding factor which can |
| | | | function as a cross-talk blocker, blocking enhancer- |
| | | | promoter interaction. |
| 184 | DNA | 4X AT-DUF936 | 4X multimerization of AT-DUF626 CTB, a cross talk |
| | | (BZP1) | blocker found in a protein with unknown function |
| | | | (DUF936) in Arabidopsis thaliana with homology to CTCF- |
| | | | binding sites for CCCTC-binding factor. A unique 10 bp |
| | | | spacer is between each CTB. |
| 185 | DNA | GM-CTCF-1 CTB | A sequence from Glycine max with homology to CTCF- |
| | | | binding sites for CCCTC-binding factor which can function |
| | | | as a cross-talk blocker, blocking enhancer-promoter |
| | | | interaction. |
| 186 | DNA | 4X GM-CTCF-1 | 4X multimerization of GM-CTCF-1 CTB, a cross talk |
| | | (BZP1) | blocker from Glycine max with homology to CTCF-binding |
| | | | sites for CCCTC-binding factor. A unique 10 bp spacer is |
| | | | between each CTB. |
| 187 | DNA | GM-CTCF-2 CTB | A sequence from Glycine max with homology to CTCF- |
| | | | binding sites for CCCTC-binding factor which can function |
| | | | as a cross-talk blocker, blocking enhancer-promoter |
| | | | interaction. |
| 188 | DNA | 4X GM-CTCF-2 | 4X multimerization of GM-CTCF-2 CTB, a cross talk |
| | | (BZP1) | blocker from Glycine max with homology to CTCF-binding |
| | | | sites for CCCTC-binding factor. A unique 10 bp spacer is |
| | | | between each CTB. |
| 189 | DNA | GM-MAT-1 CTB | A sequence from Glycine max with homology to CTCF- |
| | | | binding sites for CCCTC-binding factor which can function |
| | | | as a cross-talk blocker, blocking enhancer-promoter |
| | | | interaction. |
| 190 | DNA | 4X GM-MAT-1 | 4X multimerization of GM-MAT-1 CTB, a cross talk |
| | | (BZP1) | blocker found in mitochondrial ABC transporter gene in |
| | | | Glycine max with homology to CTCF-binding sites for |
| | | | CCCTC-binding factor. A unique 10 bp spacer is between |
| | | | each CTB. |
| 191 | DNA | GM-CTCF-3 CTB | A sequence from Glycine max with homology to CTCF- |
| | | | binding sites for CCCTC-binding factor which can function |
| | | | as a cross-talk blocker, blocking enhancer-promoter |
| | | | interaction. |
| 192 | DNA | 4X GM-CTCF-3 | 4X multimerization of GM-CTCF-3 CTB, a cross talk |
| | | (BZP1) | blocker from Glycine max with homology to CTCF-binding |
| | | | sites for CCCTC-binding factor. A unique 10 bp spacer is |
| | | | between each CTB. |
| 193 | DNA | GM-MAT-2 CTB | A sequence from Glycine max with homology to CTCF- |
| | | | binding sites for CCCTC-binding factor which can function |
| | | | as a cross-talk blocker, blocking enhancer-promoter |
| | | | interaction. |
| 194 | DNA | 4X GM-MAT-2 | 4X multimerization of GM-MAT-2 CTB, a cross talk |
| | | (BZP1) | blocker found in mitochondrial ABC transporter gene in |
| | | | Glycine max with homology to CTCF-binding sites for |
| | | | CCCTC-binding factor. A unique 10 bp spacer is between |
| | | | each CTB. |
| 195 | DNA | AT-CYT P450 CTB | A sequence with homology to BSwt of scs elements |
| | | | (Gaszner, et. al. 1999) found within the Cytochrome P450 |
| | | | gene in Arabidopsis thaliana to test as CTB |
| 196 | DNA | AT-ICGP CTB | A sequence with homology to BSwt of scs elements |
| | | | (Gaszner, et. al. 1999) found in Arabidopsis thaliana to test |
| | | | as CTB |
| 197 | DNA | AT-ITGP CTB | A sequence with homology to BSwt of scs elements |
| | | | (Gaszner, et. al. 1999) found in Arabidopsis thaliana to test |
| | | | as CTB |
| 198 | DNA | AT-PHY A CTB | A sequence with homology to BSwt of scs elements |
| | | | (Gaszner, et. al. 1999) found in Arabidopsis thaliana to test |
| | | | as CTB |
| 199 | DNA | AT-RING CTB | A sequence with homology to BSwt of scs elements |
| | | | (Gaszner, et. al. 1999) found in Arabidopsis thaliana to test |
| | | | as CTB |
| 200 | DNA | ZM-IDGP CTB | A sequence with homology to BSwt of scs elements |
| | | | (Gaszner, et. al. 1999) found in Zea mays to test as CTB |
| 201 | DNA | ZM-ICGP CTB | A sequence with homology to BSwt of scs elements |
| | | | (Gaszner, et. al. 1999) found in Zea mays to test as CTB |
| 202 | DNA | ZM-IDGP-2 CTB | A sequence with homology to BSwt of scs elements |
| | | | (Gaszner, et. al. 1999) found in Zea mays to test as CTB |
| 203 | DNA | ZM-IDGP-3 CTB | A sequence with homology to BSwt of scs elements |
| | | | (Gaszner, et. al. 1999) found in Zea mays to test as CTB |
| 204 | DNA | ZM-IDGP-4 CTB | A sequence with homology to BSwt of scs elements |
| | | | (Gaszner, et. al. 1999) found in Zea mays to test as CTB |
| 205 | DNA | GM-CYT P450 CTB | A sequence with homology to BSwt of scs elements |
| | | | (Gaszner, et. al. 1999) found in Glycine max to test as CTB |
| 206 | DNA | GM-CYT P450-2 CTB | A sequence with homology to BSwt of scs elements |
| | | | (Gaszner, et. al. 1999) found in Glycine max to test as CTB |
| 207 | DNA | GM-IDGP CTB (REV) | A sequence with homology to Scs binding protein (SBP) |
| | | | sequence from Glycine max to test as CTB |
| 208 | DNA | GM-IDGP CTB | A sequence with homology to BSwt of scs elements |
| | | | (Gaszner, et. al. 1999) found in Glycine max to test as CTB |
| 209 | DNA | GM-CYT P450-3 CTB | A sequence with homology to BSwt of scs elements |
| | | | (Gaszner, et. al. 1999) found in Glycine max to test as CTB |
| 210 | DNA | ZM-TBS1 CTB | Orthologous sequence in Zea mays to Petunia hybrida |
| | | | transformation booster sequence (TBS), which blocks |
| | | | enhancer-promoter activity (Hily, Singer et al, 2009) |
| | | | making it a cross-talk blocker. |
| 211 | DNA | ZM-TBS2 CTB | Orthologous sequence in Zea mays to Petunia hybrida |
| | | | transformation booster sequence (TBS), which blocks |
| | | | enhancer-promoter activity (Hily, Singer et al, 2009) |
| | | | making it a cross-talk blocker. |
| 212 | DNA | ZM-TBS3 CTB | Orthologous sequence in Zea mays to Petunia hybrida |
| | | | transformation booster sequence (TBS), which blocks |
| | | | enhancer-promoter activity (Hily, Singer et al, 2009) |
| | | | making it a cross-talk blocker. |
| 213 | DNA | ZM-TBS4 CTB | Orthologous sequence in Zea mays to Petunia hybrida |
| | | | transformation booster sequence (TBS), which blocks |
| | | | enhancer-promoter activity (Hily, Singer et al, 2009) |
| | | | making it a cross-talk blocker. |
| 214 | DNA | ZM-TBS5 CTB | Orthologous sequence in Zea mays to Petunia hybrida |
| | | | transformation booster sequence (TBS), which blocks |
| | | | enhancer-promoter activity (Hily, Singer et al, 2009) |
| | | | making it a cross-talk blocker. |
| 215 | DNA | ZM-TBS6 CTB | Orthologous sequence in Zea mays to Petunia hybrida |
| | | | transformation booster sequence (TBS), which blocks |
| | | | enhancer-promoter activity (Hily, Singer et al, 2009) |
| | | | making it a cross-talk blocker. |
| 216 | DNA | ZM-TBS7 CTB | Orthologous sequence in Zea mays to Petunia hybrida |
| | | | transformation booster sequence (TBS), which blocks |
| | | | enhancer-promoter activity (Hily, Singer et al, 2009) |
| | | | making it a cross-talk blocker. |
| 217 | DNA | ZM-TBS8 CTB | Orthologous sequence in Zea mays to Petunia hybrida |
| | | | transformation booster sequence (TBS), which blocks |
| | | | enhancer-promoter activity (Hily, Singer et al, 2009) |
| | | | making it a cross-talk blocker. |
| 218 | DNA | ZM-TBS9 CTB | Orthologous sequence in Zea mays to Petunia hybrida |
| | | | transformation booster sequence (TBS), which blocks |
| | | | enhancer-promoter activity (Hily, Singer et al, 2009) |
| | | | making it a cross-talk blocker. |
| 219 | DNA | PH-TBS CTB (TR1) | Truncated version of PH-TBS CTB, a transformation |
| | | | booster sequence (TBS) from Petunia hybrida which blocks |
| | | | enhancer-promoter activity (Hily, Singer et al, 2009), |
| | | | making it a cross-talk blocker. |
| 220 | DNA | SL-TBS CTB | Orthologous sequence in Solanum lycopersicum to Petunia |
| | | | hybrida transformation booster sequence (TBS), which |
| | | | blocks enhancer-promoter activity (Hily, Singer et al, 2009) |
| | | | making it a cross-talk blocker. |
| 221 | DNA | OS-DHS1 (MOD1) | Intergenic region from Oryza sativa, with high DNase |
| | | | hypersensitivity, genomic location is |
| | | | Chr7: 16144038 . . . 16144473. |
| 222 | DNA | OS-DHS2 (MOD1) | Intergenic region from Oryza sativa, with DNase |
| | | | hypersensitivity, genomic location is |
| | | | Chr8: 21048284 . . . 21048731. |
| 223 | DNA | OS-DHS3 (MOD1) | Intergenic region from Oryza sativa, with DNase |
| | | | hypersensitivity, genomic location is |
| | | | Chr2: 28170208 . . . 28170687. |
| 224 | DNA | OS-DHS4 (MOD1) | Intergenic region from Oryza sativa, with DNase |
| | | | hypersensitivity, genomic location is |
| | | | Chr4: 33443937 . . . 33444440. |
| 225 | DNA | OS-DHS5 (MOD1) | Intergenic region from Oryza sativa, with DNase |
| | | | hypersensitivity, genomic location is |
| | | | Chr5: 28025699 . . . 28026132. |
| 226 | DNA | OS-DHS6 (MOD1) | Intergenic region from Oryza sativa, with DNase |
| | | | hypersensitivity, genomic location is |
| | | | Chr6: 16292319 . . . 16292667. |
| 227 | DNA | OS-DHS7 (MOD1) | Intergenic region from Oryza sativa, with DNase |
| | | | hypersensitivity, genomic location is |
| | | | Chr8: 25636379 . . . 25636878. |
| 228 | DNA | OS-DHS8 (MOD1) | Intergenic region from Oryza sativa, with DNase |
| | | | hypersensitivity, genomic location is |
| | | | Chr8: 25621000 . . . 25621379. |
| 229 | DNA | OS-DHS9 (MOD1) | Intergenic region from Oryza sativa, with DNase |
| | | | hypersensitivity, genomic location is |
| | | | Chr9: 17275575 . . . 17276285. |
| 230 | DNA | OS-DHS10 (MOD1) | Intergenic region from Oryza sativa, with DNase |
| | | | hypersensitivity, genomic location is |
| | | | Chr10: 22658189 . . . 22658479. |
| 231 | DNA | OS-DHS15 (MOD1) | Intergenic region from Oryza sativa, with DNase |
| | | | hypersensitivity, genomic location is |
| | | | Chr8: 21042139 . . . 21042670. |
| 232 | DNA | OS-DHS18 (MOD1) | Intergenic region from Oryza sativa, with high DNase |
| | | | hypersensitivity, genomic location is |
| | | | Chr7: 22384243 . . . 22384593. |
| 233 | DNA | OS-DHSC2 ENH1 | A 31 bp sequence with in the DHS co-ordinates |
| | | (TR1) | Chr2: 31783851 . . . 31785303. |
| 234 | DNA | OS-DHSC5 ENH1 | A 31 bp sequence with in the DHS co-ordinates |
| | | (TR1) | Chr5: 22452532 . . . 22453378. |
| 235 | DNA | BD-DHS3 | Intergenic region from Brachypodium distachyon, with |
| | | | DNase hypersensitivity, genomic location is |
| | | | Chr3: 20961596 . . . 20961857. |
| 236 | DNA | BD-DHS6 (MOD1) | Intergenic region from Brachypodium distachyon, with |
| | | | DNase hypersensitivity, genomic location is |
| | | | Chr1: 19108672 . . . 19109075. |
| 237 | DNA | BD-DHS7 (MOD1) | Intergenic region from Brachypodium distachyon, with |
| | | | DNase hypersensitivity, genomic location is |
| | | | Chr3: 47221260 . . . 47221579. |
| 238 | DNA | BD-DHS8 | Intergenic region from Brachypodium distachyon, with |
| | | | DNase hypersensitivity, genomic location is |
| | | | Chr1: 58189954 . . . 58190135. |
| 239 | DNA | BD-DHS11 (MOD1) | Intergenic region from Brachypodium distachyon, with |
| | | | DNase hypersensitivity, genomic location is |
| | | | Chr3: 38853080 . . . 38853719. |
| 240 | DNA | BD-DHS12 (MOD1) | Intergenic region from Brachypodium distachyon, with |
| | | | DNase hypersensitivity, genomic location is |
| | | | Chr1: 20083313 . . . 20083880. |
| 241 | DNA | BD-DHS16 (MOD1) | Intergenic region from Brachypodium distachyon, with |
| | | | DNase hypersensitivity, genomic location is |
| | | | Chr1: 35765660 . . . 35768479. |
| 242 | DNA | BD-DHS18 (MOD1) | Intergenic region from Brachypodium distachyon, with |
| | | | DNase hypersensitivity, genomic location is |
| | | | Chr2: 14391681 . . . 14392228. |
| 243 | DNA | SI-LTP2-2 UAR1 | Upstream Activation Region 1 of Setaria italica |
| | | | Bifunctional inhibitor/lipid-transfer protein/seed storage 2S |
| | | | albumin-like protein/Probable lipid transfer (LTP_2) |
| | | | promoter; reference sequence Seita.9G570900; edited to |
| | | | remove unwanted ORFs and RE sites; from −994 to −55 (no |
| | | | TATA) |
| 244 | DNA | ZM-NACI UAR1 | Upstream Activation Region 1 of Zea mays NaCl stress |
| | | | protein 1 (nac1) promoter; reference sequence |
| | | | dpzm10g022630.1.1; GRMZM2G015605_T01; from −1025 |
| | | | to −52 (no TATA); edited to remove unwanted ORF. |
| 245 | DNA | BD-LHCB2 (MOD1) | Upstream Activation Region 1 of Brachypodium distachyon |
| | | UAR1 | light-harvesting complex II chlorophyll a/b binding protein |
| | | | 2 (LHCB2); reference sequence Bradi1g15290.1; edited to |
| | | | remove unwanted RE sites and ORF; from −1017 to −55 (no |
| | | | TATA) |
| 246 | DNA | ZM-THAUMATIN | Upstream Activation Region 1 of Zea mays Thaumatin, |
| | | UAR1 | pathogenesis-related (similar to prp5) promoter; reference |
| | | | sequence dpzm01g055930.1.1; GRMZM2G402631_T01; |
| | | | from −1010 to −54 (no TATA.) |
| 247 | DNA | BD-LTP2 UAR1 | Upstream activation region 1 of the Brachypodium |
| | | | distaychon tonoplast intrinsic protein/aquaporin transporter |
| | | | promoter from −1006 to −53 (no TATA), reference sequence |
| | | | Bradi2g17550.1 edited to remove ORF. |
| 248 | DNA | BD-GST UAR1 | Upstream activation region 1 of Brachypodium distaychon |
| | | | Glutathione S-transferase promoter; reference sequence |
| | | | Bradi2g13110.1; from −1006 to −57 (no TATA); edited to |
| | | | remove RE site and ORF. BglII sites not removed. |
| 249 | DNA | ZM-PLTP UAR1-V1 | Upstream activation region 1 from the zea mays |
| | | | phospholipid transfer protein promoter, reference sequence |
| | | | GRMZM2G101958 (historical reference |
| | | | dpzm10g001940.1.1). From −952 to −56 (no TATA). edited |
| | | | to remove unwanted RE site |
| 250 | DNA | SB-DUF3054 UAR1 | Upstream Activation Region 1 of Sorghum bicolor protein |
| | | | of unknown function (DUF3054) promoter; from −1120 |
| | | | to −56 (no TATA); reference sequence Sobic.001G104800; |
| | | | edited to removed unwanted RE sites. |
| 251 | DNA | STV6 | 3 kb coding sequence amplified from cDNA of Arobidopsis |
| | | | thaliana AT2G26080.1 gene as CTB test |
| 252 | DNA | STV7 | 1.7 Kb coding sequence amplified from cDNA of |
| | | | Arobidopsis thaliana AT2G26080.1 gene as CTB test |
| 253 | DNA | STV8 | Intergenic region and 3¹ UTR from Convergent gene pair as |
| | | | CTB |
| 254 | DNA | STV9 | 4x terminator as CTB |
| 255 | DNA | STV10 | 4x terminator in reverse as CTB |
| 256 | DNA | STV11 | Intergenic region and 3¹ UTR from Convergent gene pair as |
| | | | CTB |
| 257 | DNA | STV12 | 4x terminator as CTB |
| 258 | DNA | STV13 | 4x terminator in reverse as CTB test |
| 259 | DNA | STV14 | Intergenic region and 3¹ UTR from Convergent gene pair as |
| | | | CTB |
| 260 | DNA | STV15 | 4x terminator as CTB |
| 261 | DNA | STV16 | 4x terminator in reverse as CTB test |
| 262 | DNA | STV17 | 1 Kb coding sequence as CTB test |
| 263 | DNA | STV18 | Poly A signal sequences from 5 Terminators as CTB |
| 264 | DNA | STV19 | Poly A signal sequences from 5 Terminators in reverse as |
| | | | CTB test |
| 265 | DNA | STV20 | Poly A signal sequences from 5 Terminators as CTB |
| 266 | DNA | STV21 | Poly A signal sequences from 5 Terminators in reverse as |
| | | | CTB test |
| 267 | DNA | OVERLAPPING DCM | String of 25 restriction endonuclease sites each blocked by |
| | | BLOCK | overlapping Dcm methylation sequence CCWGG (where W |
| | | | is A or T). From 5 prime to 3 prime those sites are Acc65I, |
| | | | AlwNI, ApaI, AvaII, BanI, BsaI, BsaHI, BslI, BssKI, |
| | | | BstXI, EaeI, EcoO109I, MscI, NlaIV, PflMI, PpuMI, |
| | | | PspGI, PspOMI, Sau96I, ScrFI, SexAI, SfiI(x2), SfoI, StuI. |

The application's sequence listing, which the Patent Office published only in electronic form, follows.

SEQUENCE LISTING (267 sequences)

SEQ ID NO: 1 - DNA, 129 bp, Zea mays
  source 1..129: mol_type = other DNA
cacggtaggggtcgtacagggtgttgaagaagaacggggtggatgggctgaggaggttcttgatgtgctgctcaagagcattgatatccttgccagatgggtccttggcaacctaaacgatgtgcaaag

SEQ ID NO: 2 - DNA, 147 bp, Zea mays
  source 1..147: mol_type = other DNA
ttcacgttttctagaagtggtgataatttgaactttgtccaaagtagtactgacatgttccgtgcgaaagattattctcaatgggaagaggaaaacactgtttccaaagctatcatgtcaaaaaaaaaacactaaatctcttgtatt

SEQ ID NO: 3 - DNA, 147 bp, Zea mays
  source 1..147: mol_type = other DNA
tcgcctgccgcgcaggaccttctcaagaggatcctccaaccgaatccgatgaagaggatcaacgtcgcggggatcagggagcacgagtggttcaagaaggactacgtgcctgctgttccgcacgatgatgacgaagacgtccttcct

SEQ ID NO: 4 - DNA, 166 bp, Zea mays
  source 1..166: mol_type = other DNA
agtcttcgagtaaataaccatcaaagagggtacttgaaaggaagaggatacacagaaaaacatgtaaaagaagatgacaaactatattcacgaggtagccttagagataaactatattcacgaggtagccttagagatgtgtggagtaactaaagggagtggagga

SEQ ID NO: 5 - DNA, 171 bp, Zea mays
  source 1..171: mol_type = other DNA
tgagctgcagagttgagacgcggctcagagcagaggccatcttcttcagaaaccatcagatcaccatggaatggcacggctttgttgcatccagaacgcctgcgcctgaaccatgttgaccatacttggacagcttgtacgttgttgtccagctggtgaaacgaaacgatg

SEQ ID NO: 6 - DNA, 189 bp, Zea mays
  source 1..189: mol_type = other DNA
tggtcggcagaatcccatcaaagatgtgatcatttctaccgacccaaatgagttcattagtatgataattttcatgtagagagaggcttccaattatcttccttcttaaaacttcaacccttccaggctccatagtgcgtaatcaattcctctcctatagccacgtccgtcctcacctcacgccgccca

SEQ ID NO: 7 - DNA, 132 bp, Zea mays
  source 1..132: mol_type = other DNA
ctccctcctttattatataaaagttaggtattacatcaggaccagtttagcaacgcgcacgggaaagggaaagcgcgtcagcggtcagcccaacccacgctgaggagggcctggttcgcggcccggatcggg

SEQ ID NO: 8 - DNA, 116 bp, Zea mays
  source 1..116: mol_type = other DNA
ctcatttggcaatactactgccccgggcctgcagcagtatccaaatggaccggcccatttatgtggcccctgtcctttttcatcaggcatcggttttgggctcacagaggagatgg

SEQ ID NO: 9 - DNA, 226 bp, Zea mays
  source 1..226: mol_type = other DNA
tttgtccatatagatcagatgaggtcaaggaattctactggtaagattatgttggtgtgtgcatgggtcccattgccatctgcctcgtgtcccatgcctgctggatgtttttttgtacttatcttaggtagatatttcttcagaaatagacctggtgctgactgctgaccggttgaaagctatagatgcactgtaggcgtaggaagcttccgacagatgctgccgt

SEQ ID NO: 10 - DNA, 129 bp, Zea mays
  source 1..129: mol_type = other DNA
acaaaaaaacacggcccaagcccaaacctgccacagctcggcccaatcaacacaccaaccgatgtgagtcttggccggctggttggtgggacccggcggacagcgtcgccaggctgtgttcccccaccc

SEQ ID NO: 11 - DNA, 106 bp, Zea mays
  source 1..106: mol_type = other DNA
caccaccgcagagaagagaaaaggttgggcaagaaagggaccttgctgggcaacaacttcacacattggtgcgagtgcagcatcgccatcgccatcgccatcgcta

SEQ ID NO: 12 - DNA, 180 bp, Zea mays
  source 1..180: mol_type = other DNA
aaaacacatccgacccatgtctggagcctgtcgtgcacggtgaaaggacacgtttttttttaaaaaaaaatccggggtggttcgtactggaccctaagagcatctccaaaagactctttattttttactctttatttgactctttatctgtctcttcataaagattaaactctatatata

SEQ ID NO: 13 - DNA, 161 bp, Zea mays
  source 1..161: mol_type = other DNA
tgtttttttcctctggactcactttcttgactacagcagaagttactactatctgcagattatctacgcaacggttttacgtggatcttatccgcttgttcaaccccccaaataaaaatagtaggactaaaccgaagacgctcgcgtactgaaaggctgca

SEQ ID NO: 14 - DNA, 152 bp, Zea mays
  source 1..152: mol_type = other DNA
tttattttgttaatattatcattggattggatttatcttttgggttatatattattatatccatttttttaacgatcaaagaaggggaaaaaaccagcaggccgatctgaggcccatgctcatacgtgcctgacagcctgagtgcctccctc

SEQ ID NO: 15 - DNA, 106 bp, Zea mays
  source 1..106: mol_type = other DNA
agatttgaatctgattttagcgaatcaagtgaaactgtctcatacaaaacggcagctggcaagttgcaacgtatttagacgtccaatcaggaggcgagcaaatcca

SEQ ID NO: 16 - DNA, 116 bp, Zea mays
  source 1..116: mol_type = other DNA
gcggggggcatgtgttttgcaccatatttggcactgggcacggtcgaatggtccgaccatatggcctggacagtttgggcccagacggtctacgggttacgctagatggcacacca

SEQ ID NO: 17 - DNA, 114 bp, Zea mays
  source 1..114: mol_type = other DNA
cctcgtggttgtgctcagtgctctgctcactacggaatgctgtgcactactgttcctgatgtgagacatggtgtcaatgatctctcttgactttagcaatttgttttttttttt

SEQ ID NO: 18 - DNA, 102 bp, Zea mays
  source 1..102: mol_type = other DNA
cgcccgccccacatgccagctgtgttacttctcttcggacagaagcaagagcaaagccaaagagcatgtccttgtcgtcctagtccataaggccaattgctg

SEQ ID NO: 19 - DNA, 150 bp, Zea mays
  source 1..150: mol_type = other DNA
gcttccgcttccggtttcataggatagtaccagctcggcagcccttggtgggtgaggcaaccgaagcagactacaaaagaaggtgcagggcaccgtcacaattcatacctttctcggccttttggctaagatcaagtgtagtatctgttc

SEQ ID NO: 20 - DNA, 143 bp, Zea mays
  source 1..143: mol_type = other DNA
agcagtgcaacttgctgctgggtagggacctactgctgggtatctttcacgtcagaagttgacatttaacagaactgagccgccccgaagacgcaacacgcacgcactgggctacattgcgggcgaccgagttcgcctgctcc

SEQ ID NO: 21 - DNA, 119 bp, Zea mays
  source 1..119: mol_type = other DNA
cttttccagtttttttgtggtaaatagatcattattaatttggcataattatattcataatcgagcattgcatctaattgtgctaattcatttgctgctgaattttgctttgtttttat

SEQ ID NO: 22 - DNA, 129 bp, Zea mays
  source 1..129: mol_type = other DNA
ccggccgcctcacctccatgtaaagatgctgcggtttgtgcatgtagaagtagagacacacatgtgcctttggattggttcgagtacacgcgtgaagcacgagcgcgtcttttatattcgtgtggaggc

SEQ ID NO: 23 - DNA, 141 bp, Zea mays
  source 1..141: mol_type = other DNA
ccgggcatggatgatcacggccaatgaatgggttcggtccgcttcgggcttgtcaaaccggccgcactgcaagatcctcctgctgcctgctcggaacgaagccgctagccgcaggccacagagcacaagcagactgaccag

SEQ ID NO: 24 - DNA, 125 bp, Zea mays
  source 1..125: mol_type = other DNA
aaacagctgaaacgtgtagcccattattgtacctacaaggctctttgggcccctcgattttaggcccagactacgctgccagtccaccgtactctactctgttttttttttccttcttttttggg

SEQ ID NO: 25 - DNA, 136 bp, Zea mays
  source 1..136: mol_type = other DNA
cggaccctggagtgcagcccgtcgatctcctcgtcgaggtccccgtgcaccgggtcgatccgcagctggatttcgtccgagctcgccgcgttcctgcgaccccgcaaacaagtaacccaaatcaatcacgggcacc

SEQ ID NO: 26 - DNA, 118 bp, Zea mays
  source 1..118: mol_type = other DNA
ccacgagagagatgtttggataaggtccattagaaatttacgtgggcctggaatagggcttacataaacattgggctgatcgagagtgcagatgttgagaaaaatatcctttgcgaat

SEQ ID NO: 27 - DNA, 106 bp, Zea mays
  source 1..106: mol_type = other DNA
ccatgaggtcatgattacgaggcttccatcttagaactgggcaggaccatgagcttccacgacggcccggacccaggaggcccagatcctggtatgcgcttacctg

SEQ ID NO: 28 - DNA, 186 bp, Zea mays
  source 1..186: mol_type = other DNA
attagatagaattagaaaaaaattatgaagaattttgacttgctatgaatttaatcctatctaatctcgtccactattgagagcaaaacaaaatccagagatcaaccatcacaacttattcgcatcaacaacagttttgagtagaacaagctaggagaaccggtccattaaaccaaactaagtcac

SEQ ID NO: 29 - DNA, 112 bp, Zea mays
  source 1..112: mol_type = other DNA
gtttctagagtgcggggcttatgggacccgcgtggcagagacagttcgggttcggttttggtgggtgcgcggtgagctggacctgaacgtggtgattcctgcttgttttggg

SEQ ID NO: 30 - DNA, 116 bp, Zea mays
  source 1..116: mol_type = other DNA
ttgactttccgtcttattcaaaatatttatttaaaaatataaaacttttaaatcaagcacaaaatatctttaagtcatttacaattttttgtttaaaacattctacatttatatct

SEQ ID NO: 31 - DNA, 123 bp, Zea mays
  source 1..123: mol_type = other DNA
cgttggtggttcctgacatccttgttaccgtggtgaacgaacaatgacaaaaaagaaagaaagatagaaataaacaattcaagaactttgtcgtgaaacgacgtcggttcacaacacgacacc

SEQ ID NO: 32 - DNA, 118 bp, Zea mays
  source 1..118: mol_type = other DNA
gagagagggggtgatagcagttaatttaccaaactttttatttttgccgagagactgttactatatagcacgtgaggccagtggaggcctggaggggatgacgacgcgatcaacacaa

SEQ ID NO: 33 - DNA, 110 bp, Zea mays
  source 1..110: mol_type = other DNA
tgttttttttcaactttgaccgacaaaaacaaaatattcataaatatttgttaaataaaaataaaactattatatttattagtaaaacatctaccactatatatattttt

SEQ ID NO: 34 - DNA, 102 bp, Zea mays
  source 1..102: mol_type = other DNA
tttttttctgatatttttttttgggattgttcggttagggctagtttgagaaccctattttattttatttttttttcaaaaaaattagtttactttttcata

SEQ ID NO: 35 - DNA, 272 bp, Zea mays
  source 1..272: mol_type = other DNA
aaatatttatttaaaaatataaaacttttaaatcaagcacaaaatatctttaagtcatttacaattttttgtttaaaacattctacatttatatctattttctctttagcggtgtcctccatagaacgcgcccctatacgcaatggctatattagtgacatattttattttgaatttttatacgtatgcatttgacataatctcggatattttgtacgtattttagttttattaaatctgttgtttaaatcatgaaaatacatagagaagag

SEQ ID NO: 36 - DNA, 500 bp, Arabidopsis thaliana
  source 1..500: mol_type = other DNA
caatcatagatgacttggtggaatcaaacacataattgagcaaatgatatggacattaaactgaaagttagtctgtctaatggtacaactcgggttctccgattaaaattttgtcattaaaagtttgtgttgtatacttgtatgatttaaaagtttaaaagtttgaatggtacaaaacttgattttgtcataaacttgtatgatttaaaagtttaatggtacaaatgatatggacatttaaaagtttgtgttgtatacttgtatgatttaaaaaataataataataataataataataatatatatatatatatctacttgtatgatttgtatagatgtggctgtctattttttctccaccgttaactcatgtaatatatataaaaaacaaatttatacttttttgtgaaggtcttttttaaataataaaaacaaatttgggtagggaggtctatttaaaataatatggtcgcaatatttaacaatttttaaattgccaa

SEQ ID NO: 37 - DNA, 500 bp, Arabidopsis thaliana
  source 1..500: mol_type = other DNA
tagcttagagtcgcgtaataatagaaccaaactatgcaactatcattcctaccaaaaaaaaaaaaactatgcaactatcattagaaatatgtatctaataacgtgcatgttcgcattgcacgtcgtccttctttctccgacttttcctattttttttaatattattttatcaaatgtatctagcttagatacttttgatggagatgctccaatgataaaaaatagttgatccgttagccacgctagtaacatagtagttctgcataccattttctcttcattctcaattgcgtctgtttaaaatcaatgattgtgattttctaactttttcatattctattggatgggtctccaggtcaaggcgtcaagccagataatccagtggttagcagacttttcggaggagttcccgcaaatttttttcttttctttgaatttaatgtatatgcaaacttttttttagcataattataaatttttatatcctggatgttatctcg

SEQ ID NO: 38 - DNA, 500 bp, Arabidopsis thaliana
  source 1..500: mol_type = other DNA
atatgaacaacacttggagtcctcccacaagcttctctacattcccttgccttagagtactcaattttgaccatagaaacgctgcacatcttgttgtattgttcccgcaaatcttttttgataaaggattcaggctaaatccctaagtccaaatagccacgtgattcctcaaccctaaatgtcaagacttgcacataataagtttgaaccatataaaaaataaaacgcctaagcctaaaccccatctaacaaaacttgcttacaccatgtgtttgatgtaagaatgatatccctctttccaacaatcttgcttcttccctgatttgccataattcaccactaatttggtaagttgtgaagaaacttccatgaggggtaacatgaaaagaatcaccagatctacaatccatgagctatcgtcagcgacaatgttgcaaatattactttgttcaatgagatatacatctacatcttcatctgccacggcagtggtggtcttt

SEQ ID NO: 39 - DNA, 500 bp, Arabidopsis thaliana
  source 1..500: mol_type = other DNA
tcatgttgttgactaaaaatgataccaaaggctcacaggcacatgttaataccattataccacaatttactatctagatattaaagacataaatggtaaataagttatagataaattttcctatatggaacggaaatgccttctgtttaattttctggatggtgaaaaacaatggagcaattcttcttatttaccaagattatgcgagtgggaaaaagttctaacctcatagatgatatcgaagaagtgtgtcggtctaatctgtaggtcgagacgtggaggctatccccagttaaaggaatctgtaccaaactgaaacatcttctactcagtcaaatcccaatcctcatctcctacttatttcacaaacgcaaaaaaaaacagcccattgtatagatcgtgagttcttactattgaaggttacgaattgatggaatcggcttcttgttgcgattgaacggtagccatcttggtacgacatcatcgtaagaagccttgat

SEQ ID NO: 40 - DNA, 500 bp, Arabidopsis thaliana
  source 1..500: mol_type = other DNA
aaatcattcacagttatgttttctagctcaaatttaaattgtttttgagcaataatttgaagctgagggttgactatataagatatcggtgactcagttaccaagtgtttatgtagttacatttgtagaatttggcacatcaaaaggtttattctgtatctgcttctagttctattctatattccgttgtgtggacggatgacaaacttttgtactacaaaaaagaaaacatttttctattttaagtatttgttatggtttctaccattgttaacaaattctattgatatttaacacaaaaaaaaaaaaaaaaaaaaaactctattgatacaagtttttatttttggttacatgtgtttgttagacgcaccacaccatcgtactttttttttttttcttcacaccatcgtacttattatcactttatgacacaaattcaagaaacgcgacatacattacatcaactaaagaacttacacatagacatagtttgaccccaa

SEQ ID NO: 41 - DNA, 500 bp, Arabidopsis thaliana
  source 1..500: mol_type = other DNA
gaaaaacacacatacacctatcgtagtattatgggacaaattcatgaaattttgtgacatgacatacataaacagtcactcgtatctcagagtcaacctgtgattttccatcttcctaccatcagacaacattctctgtcacgtcttgaataaacttttgcaaagccacctgcgaggatccaccgtccatcgacgccacgtgacacttctcagccatctccttcactctattcctaacctcactatcattctccatcacacacctgaccgctctctctatatccaccgtcgtgactatctccatccctccgaccaacatatctcctctaaagaacttccgtatctgaaccgccaatcccaactcctccaccatcgcaaaggcgcttatcttctgctctgcgtaaagcggccacgtcaccactgttaaacattttcaaagcatgaggttcaagctcagcaactgtatttaccaatatacctttcatctttcgaaaacatct

SEQ ID NO: 42 - DNA, 500 bp, Arabidopsis thaliana
  source 1..500: mol_type = other DNA
agcttgagctagaaagaaagctaaccaatccttggaagtgaagaaatcaggaagacatttcacagggtaaggacgagtcaaaaatggaaactccaactcgttgaccgagtcttccaactcgcttacgtcatacttcttctcgtcgaacattcgttgaatatgaagtgtgattcccaaacacgtagcgtttgatgtgtataccatataacacggaactccaaattcgttaactacatcgatcatcgatgaacagaacatgtccaccacgaatccggctactcgcggcgagtcaactcctgttgaatggaagattctcgcgacaacatctctaacttgaggcttttgtttctcgatgtagacttgagttggctcttgatagtcggttggttgatttgcgacggagatggcttcgtagttgagacgatcttgagatgcggtcgtgagagatgctatataggtggtttcaacgtcgtcgtcgctaatggaagggtaagggatga

SEQ ID NO: 43 - DNA, 500 bp, Arabidopsis thaliana
  source 1..500: mol_type = other DNA
tgattacggtgatccaaaggcggtcatcgctgcggacgagtcgctttgctaactcaacggttgacctgagatgacctattccaggcgatggtatgaacacaagctgaattttcatttgttagtatactcttctttggacttttgatcgatgtggttagccagaagtagtaaaagtcgaaggtatattttatagtttacaaagataacaaccaattaacaactacatagtatccatgcaagttgttcgtttaggacaaaatccgttaataaattacaaaaataataattatgacacgattaattgttggttttagtctggaaaaaatatgttaaattaagttcaaaggagtatggaattctttaacgaattttacttgcttagatcaagtgatcaaccgaagaaatttttcctttgtcctctaattagtatgaagataaaccgtacaaaactcttttacgtgagagcatcatcatacgccacaatgtatctgccccaatag

SEQ ID NO: 44 - DNA, 500 bp, Arabidopsis thaliana
  source 1..500: mol_type = other DNA
atatgggtggagattatggtgcttgtcctcgattcaaaaacttgacaatttgttcgtaccaaaatgtcctctcagaaaaaataagtggtaattaatcattttgtcatgtaaatgcaacatttaatatttatgtggtcggacgaggaaaactaaaggcgatagattagagtttgaatacgtataattagtgatataccattgcatttttacttggttcgttagtagacagccagataactgaagtcactggacaataccttgttttgagcttcatttactcatcagtcatcacgcatgagtcatggtgcgagaagctagccataaccttgtttaatttatactattgccaactcaaaattaaatattaatgcatgataaaaattcgttgattgatagtgcactattattaagtattaactacgagtctttgacattagagttgagtttctcaaacttcataaatcaagagtgttacacttgcacatttttctttttcttat

SEQ ID NO: 45 - DNA, 500 bp, Arabidopsis thaliana
  source 1..500: mol_type = other DNA
caaattttttagttaccttcaacatttaacttaagctataatagtgtttgtacttttaactattttagttatctattgaaataatttgggaagcaagacagcaaaccaaatatgtgaagcagaagtaaaaaaatattctaaatatcttactgtactaaaatattatttaacttctgcttcacgaggttttggtttgttatcttgttttccaggttagctcaatattattatgattaacttgtgtactctgcaacaacaatatcgaaacaagaaaccacctatttttctcctgctgctacaccgcagaaatatgggaaaatcttgccaaaaacatatacaaaactaagttctcaacaaactggtctactattttaacttctgtctctactacttggcgaaacagaacagagagttttcttgctagatacatcttccaggaaaccatacacaccatatggcatgagagaaatggtagaagacatggggaacgttcgaattca

SEQ ID NO: 46 - DNA, 500 bp, Arabidopsis thaliana
  source 1..500: mol_type = other DNA
gcgactcatctaatccggtggctcgacaaacaaatgaggaatcaaatttccacaatcgcagcaagcggagactatcgatatgataaggctctccaactatagtttcaatcaagatcatgagcttttttacaaaaaattttctactctttcaatcatatgttgcacttgatgtataaacgtttatttactttttaaatataatttaacattaaattcaaaaaaaaaaaaaatattatgatttttgattggtaactggtaaccccatttaacttataaaatcacaaaaaaaatatttatgcatgacaacctttgccgagtcgcataatggttaaagttaagttaaaacatctattaaaatgattaagtgatagcattattcgtaagttacgagtatacgacaaatcatatttgatatgataacgttctttattattaattagcatcggtgccactttcttgtcaaatatatttatcttctctctttatcaatcataaaatta

SEQ ID NO: 47 - DNA, 500 bp, Arabidopsis thaliana
  source 1..500: mol_type = other DNA
atgatatcttaaagtctttgataactgaccaaaacataaagattttttcttttgtttttgaattttgagcactatgtaaacatgatacattatgttatatatacaatatgtagtacaaaatatatttattaatgaaataaaattgtttgtgatttcattgatgaattcttaatttgttaaaaaaaatcatgtgaaattgaatatggttgatagtttgaatatgttgacacttgacattaataaatttgtatatatattattttatgaaaaatagatttgtacaatttaattagttatgaacttttgattgtttgttttactattttttttatcgacaacatatataatatgcaaatttgaatcatatgactatgatacatcgacggcattaacataaaccataacgctagaaatcttaaagtattctaatagcctaatttggtttttattagaattaaaaccctacataatcctggatgtgcgtaacgtagtagttgagc

SEQ ID NO: 48 - DNA, 500 bp, Arabidopsis thaliana
  source 1..500: mol_type = other DNA
tagttatgtataaaagtcccgattgctgcgaatgatgagtatgcttttcgtttcttatattatctctacacattatccgaagagtgttccccttagctaccgttggaatcacatgaaataaaaggctatttaaaaattatactgcttgagttaaatttcattttgtttttgtaatacatcactaaaaaaatacttcaattagaaaatttggaaaatatcctactatattatttgggaagtacattttaaatgtaaccttaatttttgtaagtaattacataggtttgccattagaaataaaattttaaagagtaaattaatttatctctttaaggattaaaaagtcaaatactaatttaattaattaaatttaattaaaaaacgaaatacattattaatttccaaaaataataatcaataaaaatcaacatataagatttgatatctaaattttaattaatttaatttaattagaaaaacgaaatacattattaatttcc

SEQ ID NO: 49 - DNA, 500 bp, Arabidopsis thaliana
  source 1..500: mol_type = other DNA
aaaaaagtaaccaattaaaatcaacaaattatatttgatatctaaattatcatattaattttttattaattattatagttcacttctcatctttatatgattctatttttgcggaaaaataatatcatcattataaaaaaataattagagtttttcccatatgccataatttgaatttttaaaaacaaatataaactgttcaatacataaaaaaatattataacgggtaacaaatagatttaagaaaactttctactgagtaacgagtcataatttgaaatatttatattcaatttcatacatattatattgaaaatttataatcttatatactacaataattaataacatattagatgtgattcaatttttttatacaagttggaaatcctagaattgcatgtttagatcgatattaatacaaaatggtatactacaggtgaaactcttaaattaacaatcaaactacaagtgtataatcttaaacactaaacaatata

SEQ ID NO: 50 - DNA, 500 bp, Arabidopsis thaliana
  source 1..500: mol_type = other DNA
gataatatcaacaaaacatatacaactcacagtttactatacatttaaaatcaaataaaataatatcaaatatttttaaatcatctttacaataaaaaaattttagtttaactaaaatatatactgcaggttaatatctagattatagggcttattggatctaaagacggatcatcaaagattttttaaactgaagcaaaatatattgaatattcaaatatctatctgttaccaaattataaacaaataagtcaatttaatattttatatacgaaatcaattaaatattaatcacataaaaattagcacaaaaaaagtattcatcaattaaaaaattatcaaatctctgtgttatataagttttgatactatattcgaataaagtgtaatatactttttcaatttgtattctttaactaatttaagctaactaatatatttgctaatcttatatctatcaaaaccgactatcgtttcttatctctatagtatttttgcaa

SEQ ID NO: 51 - DNA, 500 bp, Arabidopsis thaliana
  source 1..500: mol_type = other DNA
gacttttttggtggatttggataaaagtgcattcgggtcatatggtacattctcctattaaataaatatggtgcactcctatgttattagctaaaatgtttagattctaattcagagtcatatcattaataaaattaatattaacaaaataaatagctttttggcaagacggatttggagggacgggtttttgaatcaacattaataaaaaagtaaaatataattaatccaccgtttcaatacgggttaaatctttaatttattattttttaagaccactaatattaaacatatcaaatcatcctaatttagaaaagattatataaaaccaaaaatgttatgtggtatgtataatgttactatatataaaattaaactatagatataaatatattagagaatgatacaatttgcaaaacttttctatataaaaaattattcttaaatgttaaaaattactatttttaaaaaaaatcacgggacggtaaaaaaattacaga

SEQ ID NO: 52 - DNA, 101 bp, unidentified
  source 1..101: mol_type = other DNA; note = artificial
ctgtctaacaagactacagactctgtagcaaggctacaaactcaactagcaagactacaaactatctagcaagactacagactaaagaactaggctacaaa

SEQ ID NO: 53 - DNA, 114 bp, Arabidopsis thaliana
  source 1..114: mol_type = other DNA
ttgctagttgagatattacctcttctcttcaaagtatccttgaacgctcaccggttatgaaatctctacactatagctctgtagtcttgctagatagttagttctttagctctc

SEQ ID NO: 54 - DNA, 500 bp, Arabidopsis thaliana
  source 1..500: mol_type = other DNA
ttcaaagccaatgactgttgttaggtccagtttctaaggacgaatcatccaatcactggttctttctgaacaaaacaaagagctatagagttacgttactgtagccgagacagagcctgcaatctggttatgccacatactaggttctttcttaaagttgactcactctatcctaagttctacttacaaggagctacaacaaattggtcataaccggagagcgttcaaggaggtaatatcccatcttactctgtagcaaggctacaaaaggagagctaaagaactaggctacaaaaagagagctaaagaactaactatctagcaagactacagagctatagtgtagagatttcataaccggtgagcgttcaaggatactttgaagagaagaggtaatatctcaactagcaagactacaaaaaaatggagatataaaactaactgtctaacaagactacagagctatagtagagatagatacgttcgacacttaagcatga

SEQ ID NO: 55 - DNA, 78 bp, Arabidopsis thaliana
  source 1..78: mol_type = other DNA
acaaaattgatctctccatgtagtgttctccacgacgagatctggtgacaactccagtttaagcaagaccaaaagact

SEQ ID NO: 56 - DNA, 94 bp, Arabidopsis thaliana
  source 1..94: mol_type = other DNA
tcttctcttcaaagtatccttgaacgctcaccggttatgaaatctctacactatagctctgtagtcttgctagatagttagttctttagctctc

SEQ ID NO: 57 - DNA, 94 bp, Arabidopsis thaliana
  source 1..94: mol_type = other DNA
ttgctagttgagatattacctgaacgctcaccggttatgaaatctctacactatagctctgtagtcttgctagatagttagttctttagctctc

SEQ ID NO: 58 - DNA, 94 bp, Arabidopsis thaliana
  source 1..94: mol_type = other DNA
ttgctagttgagatattacctcttctcttcaaagtatcctaatctctacactatagctctgtagtcttgctagatagttagttctttagctctc

SEQ ID NO: 59 - DNA, 94 bp, Arabidopsis thaliana
  source 1..94: mol_type = other DNA
ttgctagttgagatattacctcttctcttcaaagtatccttgaacgctcaccggttatgagtagtcttgctagatagttagttctttagctctc

SEQ ID NO: 60 - DNA, 94 bp, Arabidopsis thaliana
  source 1..94: mol_type = other DNA
ttgctagttgagatattacctcttctcttcaaagtatccttgaacgctcaccggttatgaaatctctacactatagctctgttctttagctctc

SEQ ID NO: 61 - DNA, 100 bp, Arabidopsis thaliana
  source 1..100: mol_type = other DNA
ttgctagttgagatattacctcttctcttcaaagtatccttgaacgctcaccggttatgaaatctctacactatagctctgtagtcttgctagatagtta

SEQ ID NO: 62 - DNA, 80 bp, Arabidopsis thaliana
  source 1..80: mol_type = other DNA
ttgctagttgagatattacctcttctcttcaaagtatccttgaacgctcaccggttatgaaatctctacactatagctct

SEQ ID NO: 63 - DNA, 114 bp, Arabidopsis thaliana
  source 1..114: mol_type = other DNA
ttgctagttgagatattacctcttctcttcaaagtatccttgaacgctcaccggttatgaaatctctacactatagctcttgaacgctcaccggttatgagttctttagctctc

SEQ ID NO: 64 - DNA, 100 bp, Arabidopsis thaliana
  source 1..100: mol_type = other DNA
ttcaaagccaatgactgttgttaggtccagtttctaaggacgaatcatccaatcactggttctttctgaacaaaacaaagagctatagagttacgttact

SEQ ID NO: 65 - DNA, 100 bp, Arabidopsis thaliana
  source 1..100: mol_type = other DNA
gtagccgagacagagcctgcaatctggttatgccacatactaggttctttcttaaagttgactcactctatcctaagttctacttacaaggagctacaac

SEQ ID NO: 66 - DNA, 97 bp, Arabidopsis thaliana
  source 1..97: mol_type = other DNA
aaattggtcataaccggagagcgttcaaggaggtaatatcccatcttactctgtagcaaggctacaaaaggagagctaaagaactaggctacaaaaa

SEQ ID NO: 67 - DNA, 94 bp, Arabidopsis thaliana
  source 1..94: mol_type = other DNA
gagagctaaagaacagagctatagtgtagagatttcataaccggtgagcgttcaaggatactttgaagagaagaggtaatatctcaactagcaa

SEQ ID NO: 68 - DNA, 89 bp, Arabidopsis thaliana
  source 1..89: mol_type = other DNA
gactacaaaaaaatggagatataaaactaactgtctaacaagactacagagctatagtagagatagatacgttcgacacttaagcatga

SEQ ID NO: 69 - DNA, 116 bp, Zea mays
  source 1..116: mol_type = other DNA
ctctccctccctctctctctctgtttaaaaaaacaaacacaatatattttcctttattatcctgtatggacctcaaaaattgatttcttacttttgttctagtggttcatttggtc

SEQ ID NO: 70 - DNA, 152 bp, Zea mays
  source 1..152: mol_type = other DNA
caagaaaggatgaactgaactgccacaaaaagtaagagagtcaagaggactaaatgtcagcaacgagcataatgcttcgtgaagaaccgtgaatacctgaaccggaacagcatggaagcagaaatcagctcctgctaaagcatcagcagcac

SEQ ID NO: 71 - DNA, 130 bp, Zea mays
  source 1..130: mol_type = other DNA
aaaaagactaaaccatataaatcccagtttttatccacctttatttcagttacgctaatagagaaagaatgctaagagatattttagtaattttatgatttatttaatatttttttgaatacttttagtt

SEQ ID NO: 72 - DNA, 113 bp, Zea mays
  source 1..113: mol_type = other DNA
catcatagaatatacctggttttgttggtagtgatattagttcaatgcgaatttgtctttatcatctagaatgcagacccgctatatgatttctatgttaaatgttttgaatt

SEQ ID NO: 73 - DNA, 252 bp, Zea mays
  source 1..252: mol_type = other DNA
atgaaagcataaaacagtgaaagccaaacctttgagaggtcattcagccactccccaccaaccccaagcacagcttggatcccttgggccatcctgaaagcacctcgaggccctgtgctaatcgatgtctggataaggtcctcgactaacttaggcagctcaccagctctatctgtgtttaaaataaaaaaaatgaagtggatgttaaatttacaaagaacaaacagacttaaaatcaacaaattacaaatc

SEQ ID NO: 74 - DNA, 149 bp, Zea mays
  source 1..149: mol_type = other DNA
ctcttaacctccattcgatcagtgatggtcgctaggtcaatctccgctgcagaaataaaatcaggaattcggacgaattcccaaggaagttcaacagcggaagagagaaagagaagcgtgtaatacgctgggtgccggactcgatgcga

SEQ ID NO: 75 - DNA, 152 bp, Zea mays
  source 1..152: mol_type = other DNA
cccttcccttcccttggatccatacagtacgtgtgcgtgccgtgccaagcttctccctcacctacctaaatccaatccacttcctttctttcatctgcatgcacacttcctctctctctctctctctctctctctctctctctctctctctc

SEQ ID NO: 76 - DNA, 209 bp, Zea mays
  source 1..209: mol_type = other DNA
cggggcagatccatgaacacaaaaaaaaacacgtgtcacagttgttttggcttttgtttgatatatgttttgatctgtccatggtgggtccaaacggggtacatctggatgatataaggaattaaggatacccattctaattaaacaaggtgcaggttgctgatcctatttgtcctctaggaaatgccagtgaatcagacgttgtgctg

SEQ ID NO: 77 - DNA, 138 bp, Zea mays
  source 1..138: mol_type = other DNA
tcttcatccgccttaaggtttttttagtttagttttggttttggcttttgttcctaaaagtcaaaagtcaaaccaaagggttggataggaatcagttttttataaaagccgactttcttgcagtataaaaaagaaagc

SEQ ID NO: 78 - DNA, 155 bp, Zea mays
  source 1..155: mol_type = other DNA
ttcacttttttcatgtctggaaggtcaaccatggaagtcatttttttaataagacaagtgatgaagcaatataaggagcagaaggaccgatacatggttttcatcgacttggagaaggcttatgaaaaagtactaaataatgttatgtggtgggc

SEQ ID NO: 79 - DNA, 107 bp, Zea mays
  source 1..107: mol_type = other DNA
ctgcaggcacgtgcacgagaacaggaagagatagcgagcgagcgcgctcgtcaaagatgaccagcggccttgacgggatacccagcaggatagagaagcgaggaaga

SEQ ID NO: 80 - DNA, 169 bp, Zea mays
  source 1..169: mol_type = other DNA
gattatggttcttttttatatgcaccgtgaggaagaaatatctgatggtgtgtttggtttgacttttgccctctaaaagtcaaaagccgaaccaaagggctaggtcctggaagcagctttttctaaaagccgactttctcgcagtgcaaaactgaaagcacctctgaac

SEQ ID NO: 81 - DNA, 137 bp, Zea mays
  source 1..137: mol_type = other DNA
aaaaagagaagatgagcaatggtcaaccataggcaagtcagactaatcaccaatgccacttggctgtcatatttctgaagtggcatccgataaaccataccaaattcagagtagaagagcaaccagaaaccgcaggc

SEQ ID NO: 82 - DNA, 144 bp, Zea mays
  source 1..144: mol_type = other DNA
tcttcatatggattttgaaggtcaacgacgacaaggttatgcttgataagacagtagctgaccaggtatctagttggaaaaacagccgggggcttactgatgaagctgtcaaggggcactcttgttctggaaatacatgctcgt

SEQ ID NO: 83 - DNA, 295 bp, Zea mays
  source 1..295: mol_type = other DNA
ccacacaaagcagataatatgatctgttcattcccttatgattcccaaatccatctaattaagcaatttgctcattcccttatgatccccaaatccatcaaattaagcaatcagacagaaataactgattcaaactacagcctaacggatcactggaaaggaccagccagatcttgacaaatttatataatgccatcatcattcaaaacaccagatcaacaggtaaaaaatggaccaaaatccgacgcaccgaactacataaatccagaaatcacatccagcacctagcagcaac

SEQ ID NO: 84 - DNA, 290 bp, Zea mays
  source 1..290: mol_type = other DNA
aataaaaatggtttggatcatttatcaaatggatatcatttgaaaaaaaatgatgatagtttaatattttttacttaaaataggtacgttatgatttatagagaatgattaagttttattttttaaaaaaaatatatatacagaggaaaaccacgtctgaaaccacaaaatgcccaatttgtctatttttattaactccatggtcaaaagtatcttttttcgtttggttgccaaatcgaactctcgtgtagttcagtggacgaataaaagtttttatgaaaaaaaaacac

SEQ ID NO: 85 - DNA, 129 bp, Zea mays
  source 1..129: mol_type = other DNA
tcattttaacattttggaccacgcttgcaccacttgttttgtttttgcaaatctttttggaaatttttttttaaagtctttttgcaaatagtcaaaggtatatagataagatttcgagaagcattttca

SEQ ID NO: 86 - DNA, 274 bp, Zea mays
  source 1..274: mol_type = other DNA
ttctttttgttgttgttgttttgcgttaaatggttttgtaaaaaaatgagtgctattaaataggaatcagttgtcgaaatagataatattgagataaaaagaatgtaaagagaaatatgtgtacctagtgttgtcattatctgaaaatgctaaggatttgacaacatgcacaacaaatcaatggagctaagtaaagaagacgagaagagaatagagagttatatattaaaggaactataagcagtttattgttttgtgggcataattcttacat

SEQ ID NO: 87 - DNA, 253 bp, Zea mays
  source 1..253: mol_type = other DNA
ttcttttattttagatagaagaaatgtttcttctatctaaaataaaagaatgtacccttctatccaaatccaatttgcatcgataaaataaatccaaattccagattccagcagtagatgaataattgcaaatttttgtgtgtacgagattagaataacttaaaaataactgacataattttttatttttcctggtcagaaaaatacatgaaaaagaaaggaggtagaaaaatttgttgatttatggttaaag

SEQ ID NO: 88 - DNA, 200 bp, Zea mays
  source 1..200: mol_type = other DNA
taccaattgaagatcaacacaatcatgtatataaagcgaaatatctaagcatgtcatgattaagaagtttcttaggtgcacaaaagaaacaacattttaaaggcataaattacctaaaccaagatattaccaattgaaagacaagaacacagctatgatcacaatgaatggaatttcaagaatatttaatgaaattgcat

SEQ ID NO: 89 - DNA, 103 bp, Zea mays
  source 1..103: mol_type = other DNA
atgaaatttagagaatattactggagatggagatatagagtacataattttttagagagtgatgtaaaatatagagaatattcttttagatgatgaaatttag

SEQ ID NO: 90 - DNA, 171 bp, Zea mays
  source 1..171: mol_type = other DNA
tctttgtcgagtgtcacaaacacttcgtcaaacattttatcgacaaatggttctttgtcgagtacttttttgcactcgacaatcaaaaaacactcggcaaattaagaatcacaaaaaaactaaaaacaaaatattttttaattagggaaaataaccccaaccatttttgaa

SEQ ID NO: 91 - DNA, 234 bp, Zea mays
  source 1..234: mol_type = other DNA
tttttggcaatttgtactttcttggttttggtatgctcgtaccattggaatcttgcatactcttatttttatatatgcttacctttatgtcccaatatctgtttgaagtatttcagttaagatgcccttgaccacccttgtttcctaatgatccatgagcggtcattttattttgcacatccttggtgatctcgttgtttccttataacttccttgggtaatgaatttttactt

SEQ ID NO: 92 - DNA, 217 bp, Zea mays
  source 1..217: mol_type = other DNA
agttttttatttaaaccaatatagataagttacatatgagtacaccataatttatttttctcagttgtcaaaataaaaagatttataaataaaaacttaattcaagcatacatcatttcttacacaattttttatttatatggactgtttcatatggtctattctatcaatattagaggatttttttagattttttagaagtcgttctctctttatc

SEQ ID NO: 93 - DNA, 251 bp, Zea mays
  source 1..251: mol_type = other DNA
ttatataaaataatacgaaatatgaagcatcaaagacaaataaattataaatgaacaatatcactttcatgttatatcaacttaatgcataaatattagatacatttatacctctgccttgacaaagattaattcccgagtgatgcgattgcaattacaggaatccgtgaacagtaaaggaatattgttcactatttataagcccaggacacagcctgtgaggaattacaatcatgcccctcataaaagtt

SEQ ID NO: 94 - DNA, 108 bp, Zea mays
  source 1..108: mol_type = other DNA
tttcctttatctatacattgaaaacggtaaataatagtcttgcggatccaatagagatatcgttggagctttgtcatttatagcgaaagttctgtcaggaaaggagaa

SEQ ID NO: 95 - DNA, 118 bp, Zea mays
  source 1..118: mol_type = other DNA
atatctctgatatcgactacagtttctgacaatggcatttgataccactgtactattgctgtaggtgtattcagtattcacagccgtcacagtcctttccacacatttagaagcaaaa

SEQ ID NO: 96 - DNA, 138 bp, Zea mays
  source 1..138: mol_type = other DNA
cggaaccagagattctgggttcgatccccagcggagtcgttttttgttttgttttttggcttttttaggcgtgtctttttttgttttgtttttttttggcttttctaggcgtgccttttttcgaatgttgtttttttc

SEQ ID NO: 97 - DNA, 353 bp, Zea mays
  source 1..353: mol_type = other DNA
ccgagcttatttttgtggctcgtgaaaagagcgagctagctcggctcggctcgctgcagtcaacgtggctcgtggctcgacccaacaaaaatttgttacataaaatactaattagcatataatattaataccgagtagacaattaatttatgttatttgagattactatacaaaattaatctactttctatattatatcagtaatatatttattttactaatttaaaatatttttaagattttatattataatttagagagcaaattcacgtttatggctaggctcagcgagccgctttttcaagctcgtcagatgggcgagccgagctcggctgctcggctcggctcgtttc

SEQ ID NO: 98 - DNA, 184 bp, Zea mays
  source 1..184: mol_type = other DNA
ctagaaattgattattatatacatattacttttttctgttctggttcacgagctaaacgagccggctcgagttcctaaacgagccgagccgagttgactctatggttcgttagcttaacaagccgagtcgagccatctcattaacttaacgagtcagctcgaactcggacgggtcgagccgagc

SEQ ID NO: 99 - DNA, 143 bp, Zea mays
  source 1..143: mol_type = other DNA
atccataatctcaccataagaatgagatctaaataggctcttaggagagaagatggatagatagataaatagatataaagatgaacgaggatatatgtcatgtacgggcgctcgtacgccaggcagcgtcgcgcccgtgacag

SEQ ID NO: 100 - DNA, 108 bp, Zea mays
  source 1..108: mol_type = other DNA
aggtcgagccgagccgagcctctttcaccagctcgtggaatggacgagccgagtcgagctcgttcagtcaacgagccgcaccgagccgagccgaactcggctcatttc

SEQ ID NO: 101 - DNA, 145 bp, Zea mays
  source 1..145: mol_type = other DNA
ggaaatttggatctgtatcatttataaaaaagattaaatttggatcggtgctatagatgtccaataagcacgagtcccgcgagcccggcacgaagcccgctttttgggcccggtccgagcccggcacgacccggttatatgcggg

SEQ ID NO: 102 - DNA, 165 bp, Zea mays
  source 1..165: mol_type = other DNA
cgacgtcgtatgacatcaaatgtttgaatatcaattataaatattaaatatatatttaataaatctatctcattctttaatttagttttacaattacactatatttaatatccttaaacattattcacacactcgatactatatactttaatttagttctacaat

SEQ ID NO: 103 - DNA, 163 bp, Zea mays
  source 1..163: mol_type = other DNA
gcttactgggctgagatgtgggctagtacatttttcctttctctttttctcttctttattgatatttttttctaaacactttctcagatatcagaaaaaaaaaactaattttttttagctgcgtctattgctgaccttagctgttggcaaggagccaagtaca

SEQ ID NO: 104 - DNA, 182 bp, Zea mays
  source 1..182: mol_type = other DNA
aacaaacaaacaaacactaagcatattctcgacaaacttagacaattattatttgactttagattctgtttgtttaccctcgagattatataatccaatttaaataagttaagaggtaaacaaacaacacatattattggatggattatacaatctagatacctagattattattatccata

SEQ ID NO: 105 - DNA, 104 bp, Zea mays
  source 1..104: mol_type = other DNA
ctttttatatctattttccccttcttagcataaaaggacgcaatccttctggtgtcaaaaaaagttactagttatagtattttaaggtcaaagttaaaaaaaca

SEQ ID NO: 106 - DNA, 178 bp, Zea mays
  source 1..178: mol_type = other DNA
tatgtatattaaccttgcatgtcatatgtatggaaaaatatatttaatggtggcaatgcgctttctggcgtaaaagttaaaaagagagctatagaaaaatattcttatacatgttttttgcatgtttcacttattaatcaggatttgcagagcatatttgtttttacgatatttatat

SEQ ID NO: 107 - DNA, 244 bp, Zea mays
  source 1..244: mol_type = other DNA
aagatccatataaaaaatactgatatatattatatttgtattttaatatatacatttatagacttaaatgttaaatttatagtgttatatgctatttttatctttatattttatattttgaactatatagcaaattattatatattatattaaattatttataaaaaattccaatggcatacctcacaaaaaaattctagctacaccgatgcactaaggtacattaaaaagcattcaagatttt

SEQ ID NO: 108 - DNA, 142 bp, Zea mays
  source 1..142: mol_type = other DNA
aaaataaacattaaattcattctatatatttttaaataattgatataaaattcggatgtctattcgaatacggattcagatgtttttttcaccttttttgttgtagggagaaaataatatacataaaaaattatataaaaat

SEQ ID NO: 109 - DNA, 104 bp, Zea mays
  source 1..104: mol_type = other DNA
aaaaaaaatcgtatattttttagaatcaacccgcacttttataatctcttctctactactataataggaaagtttacgtaaaaaataaagtgaaattatgtata

SEQ ID NO: 110 - DNA, 158 bp, Zea mays
  source 1..158: mol_type = other DNA
aagattttcctgtcactgcccctaaggaaaagagcaaagagaaagatagtgataatgatgtggctggcaagaaggaaacgagcgaggataaagagaatactgcagctggcatgaaggaaacgaggaacgatgaaggaaatgtaaccggtaaagacaaa

SEQ ID NO: 111 - DNA, 160 bp, Zea mays
  source 1..160: mol_type = other DNA
aattttatataaggctattcctaatccacggtaatacacacatttaatgcatgccatataaatatttttgatgacgtggcaagagagttaagataaaagagaagttgtatcttgagggagacactacttggggcatgagatcatatgcatttaaattata

SEQ ID NO: 112 - DNA, 173 bp, Zea mays
  source 1..173: mol_type = other DNA
tatatttttattatacataaaataaaaaaaatataaaataaaaatccaacaatatatatttaagctatatctagtattaggtccataaaaaataaaaaaacataggaatataatattatcataatataacactgtaccattaggttagcccacgagccggctgaagcttactg

SEQ ID NO: 113 - DNA, 192 bp, Zea mays
  source 1..192: mol_type = other DNA
gagaggagagggaatctctatatataatacggataaatgacctctagattaggaagacgaagaaacattatctatatttagaggacgttttatatgatgtcactgaacaaaaaagcggatagaatcccctatatttagtgcaccagaggggatacctctctactagaggcaaccttaggccatctccagtag

SEQ ID NO: 114 - DNA, 212 bp, Zea mays
  source 1..212: mol_type = other DNA
ctccagcagaaacgaacgggtccttaatgatctcgaactcctctctagaccaataaatatttggacccatttgccaactttcctaagttttattttatcgaatataaatatgtttgtgttacaacagaatatacattttactatactatttttagataatttgtgactcaaagatttatataataattacgttatttatttcaatacacttt

SEQ ID NO: 115 - DNA, 180 bp, Zea mays
  source 1..180: mol_type = other DNA
ctccaacagttttaactaaaattatacccatacaaaaatatttataataaatgtcttataaaactatatttcataattagatattattattatatatatttaaaatatttgcatttcctttgaaaccgagggagtgtataacacagaaaaaaatacagacgcaaaggcgaaaacccctcc

SEQ ID NO: 116 - DNA, 194 bp, Zea mays
  source 1..194: mol_type = other DNA
cttcagcaggcccaagaattaaacaatcttcagttctcgagaaaaagtatataagagtgacagcatgaaaagtggaaggaattcacattgaaaacacagagcgacagcatgaaaagtcgaaggaactcacatcgaaaacacatacaagtaaaatctgaagataaattatacagctttgattatataaaaataaa

SEQ ID NO: 117 - DNA, 263 bp, Zea mays
  source 1..263: mol_type = other DNA
gttgctgaggtaaacttgaaatgttatggtaaattaatactccctccgtcccaatttataattcttttgactttttttaatcaagtttgactggcttgtcttattcaattttttttttgcgaaaaaatgaaaaattcaaagccatacttaaagtatatcatatgctaaacggtatcgcattaaaaattaataataattatgatttttttgaataagacgagccagtcgaacttaaagtaaaaaagtcaaaagaattataaatt

SEQ ID NO: 118 - DNA, 304 bp, Zea mays
  source 1..304: mol_type = other DNA
attaatatgatgtaaaattttatattatttttttcatattttaaggatttttaataaaaaaatacaatattgtagatgtcattgagaactaaaagtttcataaaaaataaagatatataactttttaaggtacaccattttaatccttttgcttaagtttctttttttgacccacttagagagagagagagagttaacagcgatgagtaacggcgttgacggaagtgttaaatagaaaaaaacaagtgatagtaaatattttaaattaagatgtcaaataggaaaaaaaaaatctcgtgtatta

SEQ ID NO: 119 - DNA, 317 bp, Zea mays
  source 1..317: mol_type = other DNA
agagacacaataaatgcaaactaaaataatttttaaaaattaagtattataataaaaacaaatatatatttttaatagaaataaattaaaaataaaattgtaaaatttatttattaattcaatgtattaatcaagagatagataaataaaaaataaaatgggattaaaactaattaaatgttagaataaatttaataaaaaattatagcaagtggagtctagttttatttgtaaaaatatcaggaacataaatgtaatctttttcaattagatatattgattaagatatatagttaaacaaagtgcatatgaacaat

SEQ ID NO: 120 - DNA, 226 bp, Zea mays
  source 1..226: mol_type = other DNA
tttcatttatcactcttttatagtttgctctaaaatattctctttcctatctttatttctatataacattgttctctatattctcatcctctatgtataaatatctatattagaaacatattttactttagtttttttgtatgtacatatttatcatatctttaaatgttatatatatatattatttttgcttaatctattatttaaaatattaaaatggatagag

SEQ ID NO: 121 - DNA, 109 bp, Zea mays
  source 1..109: mol_type = other DNA
tttttatactccttccgttacaatttataattcatttgacttttttgaacctttgtttaaagtatgtaaataaaaggaaaaaaaatagtagaacttttatgctaggttt

SEQ ID NO: 122 - DNA, 168 bp, Zea mays
  source 1..168: mol_type = other DNA
tgatgtaaatataagagtatctaaataaggtctgcctaagactttgtttggttgcacttgtatatacatcaatccacatgcatggattgaagttaaaaaataactaaattccactctagttcactctaacgcacgtgcactgaggtgaatatgaggacagccaaacaa

SEQ ID NO: 123 - DNA, 206 bp, Zea mays
  source 1..206: mol_type = other DNA
aattatataaaaaatttcaagttcaaatttattgtactttagctgtaataaaaaagataaaatttctgatagatttaaattagaaaatcggttaaatattctctttttattatagctaaaatataacaaattttatatataataggattaggatggaagaaacatgtatgattttttaatttttttttataaatttgttaattcat

SEQ ID NO: 124 - DNA, 286 bp, Zea mays
  source 1..286: mol_type = other DNA
caatcttctgacctgcctggagcttaccagcgatcattttcccaacaaattgatggcaaacgatatgtaattcaataaattcatacatttttataagttgttaattcgaacctcccctcctatatgatgaagaacataaaatgcaataaagtatgatgaagaacttaagataaccttctatttttataagctgtacttttctatttttagctgttcttttctatttttacttgtccctatgtactaaagcttaaagcatgtatggtccatattcttcgccttctga

SEQ ID NO: 125 - DNA, 276 bp, Zea mays
  source 1..276: mol_type = other DNA
ctttgtaatacatcaattttttgtttaaacatatcttttagaccaaattcattgaaataatgtccaaatttatattaaattaatagactttatcatttttatttgggtgcttaaggttatcttcacgtgggaacttaagattatctttttatagactatttattagtattggtaacttatttgtattttttggtcaatactacaatattttaatgatttaattgtattttgatgattttctatgacaataaattaataatacataaatagcctcaa

SEQ ID NO: 126 - DNA, 224 bp, Zea mays
  source 1..224: mol_type = other DNA
tttgaaaaataaaaaattcaatgttatatttaaagtatattatatgctaaacaatatcaaggaaaaaataacaatagttatgaaaatttttaaataagacgagttggtcaaattttaggtaaaaaagttaaacgaattataaattagaacggagtgaatatattagtggcagtaccaacaacagaaagagggcgaagagatagagagaaaaaactagtgatgaa

SEQ ID NO: 127 - DNA, 217 bp, Zea mays
  source 1..217: mol_type = other DNA
taatatttaaaacaatagatttagaaaaactaaaatatgtatcatacatttaagagtacgacaaatacgtacgtataaaaattaaaagtaaaatatgtctctaatatagatatttatgtataaagaatgagatatagaaaatattattgaaggaggaaatatagagaatagattcttttaaagaagaccgtaaaggatgaatatagaagataaattt

SEQ ID NO: 128 - DNA, 241 bp, Zea mays
  source 1..241: mol_type = other DNA
agcgtgctcttctagttcaaacatcaagaaatatatttgattctctctatcaacactaacattattgtatcaatatatatttaaagagaaaatataaaagatcaagaaatatatgtaattttctctatcaacactaacactattgtatcaatgtatgttatatgtgcctttaaagagagagaatctctatatgtgccttaagagagcgtgatttaaatttaaatcggaataaaaagtggtt

SEQ ID NO: 129 - DNA, 228 bp, Zea mays
  source 1..228: mol_type = other DNA
ttatataaaaagaaataaaaaggataacttttgttaaaaggaagattgaaccaattcaaacatatgaatggataaattaaactaaaaatacattaaaatacattaggggtttaaacaaagtacataaaatactaaaaactaaaaatatatgtatatcttataaaaataaatctgcataatttaaacagctcttcatcgttgtcgttcttctctcaacttctttcccat

SEQ ID NO: 130 - DNA, 274 bp, Zea mays
  source 1..274: mol_type = other DNA
aatatttgttgtctgctattttatttttaactaaaacgcaacaaataaacaaaaaaaacgaagagagtggtatttagcaagttgttgctaaatacatattagaaaaatattagcttcctactattctcaatttttaggttattaaatatttttagattatgatatccaaattttctatttattacttacaactttaaatttagtttgatgtacaataaagttcaataatcatcattcttactattttcattctatatgaatcacatccaatcaa

SEQ ID NO: 131 - DNA, 419 bp, Zea mays
  source 1..419: mol_type = other DNA
aacaatatagagacagaaaatagataaatggataacaaatgtatttttggtctattggtttagatacctcaatcgaatgtgattctcttatatatatatatatatatatatatatatatatatatatatatatatatatatatatatatatatatatatatatatatatatatatatatatatatatatatatatatatatatatatatatatatatatatatactcgtgtgttgcgacagtatctaactatatatatatatatatatatatatatatatatatatatactcgtgtgttgcgacagtatctaactatatttaaagatattgattggatgactaagcgacacttgagagtcttaatagaccctccacataaaaatataataaataaatttaatatcaaagtaaacatatt

SEQ ID NO: 132 - DNA, 500 bp, Zea mays
  source 1..500: mol_type = other DNA
acattcacataaactgtctcgctggtcccagtaagttctacttacaaggagctacaacaaattggtcataaccggaaagcgttcaaggatacttttaagaggtaatatctcaactaactctctaacaagactacaaaagagagctgtagaactaactatctagcaagactacatatctatagaagagaaagacaggtgaagacattaaagcatgaccatttagcaaggagacacagaggtttaagaatgaaacagctctttgttcaaatagtctagggtggtgcattagaagattgatgcaatagacaataagtatcacaacagaggcaattcaaacaacctaaacttgagagttaccaaaggatgaatgagtatgtactcaacataatcacagaaactccagtgaaccagactgtataaagttataaacatagtaacggtatcacatatgacataacatcatggaaaaaactttggatgcagataaagctaacgcgaat

SEQ ID NO: 133 - DNA, 11 bp, unidentified
  source 1..11: mol_type = other DNA; note = Artificial
tgtttttytct

SEQ ID NO: 134 - DNA, 23 bp, unidentified
  source 1..23: mol_type = other DNA; note = Artificial
gdtgargadggacnvsgygshng

SEQ ID NO: 135 - DNA, 28 bp, unidentified
  source 1..28: mol_type = other DNA; note = Artificial
rkgccatanagysbdrccmktcsaycgt

SEQ ID NO: 136 - DNA, 15 bp, unidentified
  source 1..15: mol_type = other DNA; note = Artificial
attcacgaggtagcc

SEQ ID NO: 137 - DNA, 29 bp, unidentified
  source 1..29: mol_type = other DNA; note = Artificial
gvycrsmkskttsvtgsgayycbgcvrac

SEQ ID NO: 138 - DNA, 10 bp, unidentified
  source 1..10: mol_type = other DNA; note = Artificial
gcssggggca

SEQ ID NO: 139 - DNA, 13 bp, unidentified
  source 1..13: mol_type = other DNA; note = Artificial
agagatgtktgga

SEQ ID NO: 140 - DNA, 10 bp, unidentified
  source 1..10: mol_type = other DNA; note = Artificial
gggascwcga

SEQ ID NO: 141 - DNA, 11 bp, unidentified
  source 1..11: mol_type = other DNA; note = Artificial
ggswgwggagg

SEQ ID NO: 142 - DNA, 7891 bp, unidentified
  source 1..7891: mol_type = other DNA; note = Artificial
gaaaggcccagtcttccgactgagcctttcgttttatttgatgcctggcagttccctactctcgcgttcatggagctccaaataatgattttattttgactgatagtgacctgttcgttgcaacaaattgataagcaatgcttttttataatgccaactttgtatagaaaagttgggccgaattcctcgagctaactaactagagtctaattacaaaactaattgcacaaccgctaagctgaatcgcgagatggatctattaaccttaattagtccatgatttgacaatgtggtgctacaataaccatttgctaatgatggattacttaggtttaatagattcgtctcgtgatttagcctatgggttctgctattaattttgtaattagctcatatttagttcttataattagtatccgaacatccaatgtgacatgctaaagtttaaccctggtatccaaatgaagtcttatgagagtttcatcactccggtggtatatgtacttaggctccgttttcttccaccgacttatttttagcacccgtcacattgaatgtttagatactaattagaagtattaaacgtagactatttacaaaatccattacataagacgaatctaaacggcgagacgaatctattaaacctaattagtccatgatttgacaatgtgttgctacagtaaacatttgctaatgatggattaattaggcttaatagattcgtctcgccgtttagcctccacttatgtaatgggttttctaaacaatctacgtttaatactcctaattagtatctaaatattcaatgtgacacgtgctaaaaataagtcagtggaaggaagagaacgtccccttagttttccatcttattaattgtacgatgaaactgtgcagccagatgattgacaatcgcaatacttcaactagtgggccatgcacatcagcgacgtgtaacgtcgtgagttgctgttcccgtagagaaatatcaactggtgggccacgcacatcagcgtcgtgtaacgtggacggaggagccccgtgacggcgtcgacatcgaacggccaccaaccacggaaccacccgtccccacctctcggaagctccgctccacggcgtcgacatctaacggctaccagcaggcgtacgggttggagtggactccttgcctctttgcgctggcggcttccggaaattgcgtggcggagacgaggcgggctcgtctcacacggcacggaagacgtcacgggttccttccccacctctcctcttccccaccgccataaatagccgaccccctcgcctttctccccaatctcatctcgtctcgtgttgttcggagcacaccacccgccccaaatcgttcttcccgcaagcctcggcgatccttcacccgcttcaaggtacggcgatcgtcttcctcctctagatcggcgtgatctgcaagtagttgatttggtagatggttaggatctgtgcactgaagaaatcatgttagatccgcgatgtttctgttcgtagatggctgggaggtggaatttttgtgtagatctgatatgttctcctgtttatcttgtcacgctcctgcgatttgtggggattttaggtcgttgatctgggaatcgtggggttgcttctaggctgttcgtagatgaggtcgttctcacggtttactggatcattgcctagtagatcagctcgggctttcgtctttgtatatggtgcccatacttgcatctatgatctggttccgtggtgttacctaggtttctgcgcctgattcgtccgatcgattttgttagcatgtggtaaacgtttggtcatggtctgatttagattagagtcgaataggatgatctcgatctagctcttgggattaatatgcatgtgtcaccaatctgttccgtggttaagatgatgaatctatgcttagttaatgggtgtagatatatatgctgctgttcctcaatgatgccgtagcttttacctgagcagcatggttcctcctgttacttaggtagatgcacatgcttatagatcaagatatgtactgctactgttggaattgtttagtatacctgatgatcatccatgctcttgttacttgttttggtatacttggatgatggcatgctgctgctttttgttgatttgagcccatccatatctgcatatgtcacatgattaagatgattacgctgtttctgtatgatgccatagcttttatgtgagcaacatgcatcctcctggttatatgcattaatagatggaagatatctattgctacaatttgatgattattttgtacatacgatgatcaagcatgctcttcatactttgttgatatacttggataatgaaatgctgctgcacgttcattctatagcactaatgatgtgatgaacacgcacgacctgtttgtggcatctgtttgaatgtgttgttgctgttcactagagactgttttattaacctactgctagatacttacccttctgtctgtttattcttttgcaggtcgaccgccggggatccacacgacagcatggtgagtaaaggtgaagagttgattaaagagaacatgcatatgaagttatacatggagggaactgtcaataatcaccactttaagtgtacatcagagggtgagggaaagccatacgagggaacccaaactatgagaatcaaagtagtggagggaggtcctcttccatttgcttttgatatactagcaacaagtttcatgtatggttccaggaccttcattaaccatactcagggaatccctgacttctttaaacagtcttttcctgaaggttttacatgggagagggttaccacttacgaggacggtggagtcttgacagcaacccaggacacttcattacaagatggatgcctaatatacaatgtgaaaattaggggtgtgaatttccctagtaacggaccagttatgcagaagaaaacactaggttgggaagctaatactgaaatgttgtaccctgccgacggaggtttagaaggtagatccgacatggcccttaagctagtcggaggtggacacttgatctgtaactttaaaaccacatataggtctaagaagccagcaaagaatctaaaaatgcctggtgtttactatgtggaccatagactagaaaggataaaagaagcagacaaagaaacttacgtggagcaacatgaggtcgccgtcgctaggtattgcgacttaccttccaagctaggtcacaaattgaactgaggtaccacatggttaacctagacttgtccatcttctggattggccaacttaattaatgtatgaaataaaaggatgcacacatagtgacatgctaatcactataatgtgggcatcaaagttgtgtgttatgtgtaattactagttatctgaataaaagagaaagagatcatccatatttcttatcctaaatgaatgtcacgtgtctttataattctttgatgaaccagatgcatttcattaaccaaatccatatacatataaatattaatcatatataattaatatcaattgggttagcaaaacaaatctagtctaggtgtgttttgcgaattgcggcaagcttggagtcaaagattcaaatagaggacctaacagaactcgccgtaaagactggcgaacagttcatacagagtctcttacgactcaatgacaagaagaaaatcttcgtcaacatggtggagcacgacacgcttgtctactccaaaaatatcaaagatacagtctcagaagaccaaagggcaattgagacttttcaacaaagggtaatatccggaaacctcctcggattccattgcccagctatctgtcactttattgtgaagatagtggaaaaggaaggtggctcctacaaatgccatcattgcgataaaggaaaggccatcgttgaagatgcctctgccgacagtggtcccaaagatggacccccacccacgaggagcatcgtggaaaaagaagacgttccaaccacgtcttcaaagcaagtggattgatgtgatccgcggnnnnnnnnnnnnnnnnnnnnnnnnnnnnnnnnnnnnnnnnnnnnnnnnnnnnnnnnnnnnnnnnnnnnnnnnnnnnnnnnnnnnnnnnnnnnnnnnnnnnnnnnnnnnnnnnnnnnnnnnnnnnnnnnnccagaattctggccttcgcaagacccttcctctatataaggaagttcatttcatttggagaggactatttttacaacaattaccaacaacaacaaacaacaaacaacattacaattactatttacaattacacgactcgggatccgccatggcccagtccaagcacggcctgaccaaggagatgaccatgaagtaccgcatggagggctgcgtggacggccacaagttcgtgatcaccggcgagggcatcggctaccccttcaagggcaagcaggccatcaacctgtgcgtggtggagggcggccccttgcccttcgccgaggacatcttgtccgccgccttcatgtacggcaaccgcgtgttcaccgagtacccccaggacatcgtcgactacttcaagaactcctgccccgccggctacacctgggaccgctccttcctgttcgaggacggcgccgtgtgcatctgcaacgccgacatcaccgtgagcgtggaggagaactgcatgtaccacgagtccaagttctacggcgtgaacttccccgccgacggccccgtgatgaagaagatgaccgacaactgggagccctcctgcgagaagatcatccccgtgcccaagcagggcatcttgaagggcgacgtgagcatgtacctgctgctgaaggacggtggccgcttgcgctgccagttcgacaccgtgtacaaggccaagtccgtgccccgcaagatgcccgactggcacttcatccagcacaagctgacccgcgaggaccgcagcgacgccaagaaccagaagtggcacctgaccgagcacgccatcgcctccggctccgccttgccctccggactcagatctcgatagggtaccacatggttatcgatgggcccactaactatctatactgtaataatgttgtatagccgccggatagctagctagtttagtcattcagcggcgatgggtaataataaagtgtcatccatccatcaccatgcgtggcaacgtgagcaatgacctgattgaacaaattgaaatgaaaagaagaaatatgttatatgtcaacgagatttcctcataatgccactgacgacgtgtgtccaagaaatgtatcagtgatacgtatattcacaatttttttatgacttatactcacaatttgtttttttactacttatactcacaatttgttgtgcgtaccataacaatttcgatcgaatatatatcagaaagttgacgaaagtaagctcactcaaaaagttaaatgggctgcggaagctgcgtcaggcccaagttttggctattctatccggtatccacgattttgatggctgagggacatatgttcgcttggcgcgccggtcacccggtccgggcctagaaggccacccgggcaactttattatacaaagttggcattataaaaaagcattgcttatcaatttgttgcaacgaacaggtcactatcagtcaaaataaaatcattatttggagctccatgcatggtagcgttaacgcggccgcgatatcccctatagtgagtcgtattacatggtcatagctgtttcctggcagctctggcccgtgtctcaaaatctctgatgttacattgcacaagataaaaatatatcatcatgaacaataaaactgtctgcttacataaacagtaatacaaggggtgttatgagccatattcaacgggaaacgtcgaggccgcgattaaattccaacatggatgctgatttatatgggtataaatgggctcgcgataatgtcgggcaatcaggtgcgacaatctatcgcttgtatgggaagcccgatgcgccagagttgtttctgaaacatggcaaaggtagcgttgccaatgatgttacagatgagatggtcagactaaactggctgacggaatttatgcctcttccgaccatcaagcattttatccgtactcctgatgatgcatggttactcaccactgcgatccccggaaaaacagcattccaggtattagaagaatatcctgattcaggtgaaaatattgttgatgcgctggcagtgttcctgcgccggttgcattcgattcctgtttgtaattgtccttttaacagcgatcgcgtatttcgtctcgctcaggcgcaatcacgaatgaataacggtttggttgatgcgagtgattttgatgacgagcgtaatggctggcctgttgaacaagtctggaaagaaatgcataaacttttgccattctcaccggattcagtcgtcactcatggtgatttctcacttgataaccttatttttgacgaggggaaattaataggttgtattgatgttggacgagtcggaatcgcagaccgataccaggatcttgccatcctatggaactgcctcggtgagttttctccttcattacagaaacggctttttcaaaaatatggtattgataatcctgatatgaataaattgcagtttcatttgatgctcgatgagtttttctaatcagaattggttaattggttgtaacactggcagagcattacgctgacttgacgggacggcgcaagctcatgaccaaaatcccttaacgtgagttacgcgtcgttccactgagcgtcagaccccgtagaaaagatcaaaggatcttcttgagatcctttttttctgcgcgtaatctgctgcttgcaaacaaaaaaaccaccgctaccagcggtggtttgtttgccggatcaagagctaccaactctttttccgaaggtaactggcttcagcagagcgcagataccaaatactgtccttctagtgtagccgtagttaggccaccacttcaagaactctgtagcaccgcctacatacctcgctctgctaatcctgttaccagtggctgctgccagtggcgataagtcgtgtcttaccgggttggactcaagacgatagttaccggataaggcgcagcggtcgggctgaacggggggttcgtgcacacagcccagcttggagcgaacgacctacaccgaactgagatacctacagcgtgagcattgagaaagcgccacgcttcccgaagggagaaaggcggacaggtatccggtaagcggcagggtcggaacaggagagcgcacgagggagcttccagggggaaacgcctggtatctttatagtcctgtcgggtttcgccacctctgacttgagcgtcgatttttgtgatgctcgtcaggggggcggagcctatggaaaaacgccagcaacgcggcctttttacggttcctggccttttgctggccttttgctcacatgttctttcctgcgttatcccctgattctgtggataaccgtattaccgcctttgagtgagctgataccgctcgccgcagccgaacgaccgagcgcagcgagtcagtgagcgaggaagcggaagagcgcccaatacgcaaaccgcctctccccgcgcgttggccgattcattaatgcagctggcacgacaggtttcccgactggaaagcgggcagtgagcgcaacgcaattaatacgcgtaccgctagccaggaagagtttgtagaaacgcaaaaaggccatccgtcaggatggccttctgcttagtttgatgcctggcagtttatggcgggcgtcctgcccgccaccctccgggccgttgcttcacaacgttcaaatccgctcccggcggatttgtcctactcaggagagcgttcaccgacaaacaacagataaaac

SEQ ID NO: 143 - DNA, 7891 bp, unidentified; identical to SEQ ID NO: 142
  source 1..7891: mol_type = other DNA; note = Artificial

SEQ ID NO: 144 - DNA, 8156 bp, unidentified
  source 1..8156: mol_type = other DNA; note = Artificial
gaaaggcccagtcttccgactgagcctttcgttttatttgatgcctggcagttccctactctcgcgttcatggagctccaaataatgattttattttgactgatagtgacctgttcgttgcaacaaattgataagcaatgcttttttataatgccaactttgtatagaaaagttgggccgaattcctcgagctaactaactagagtctaattacaaaactaattgcacaaccgctaagctgaatcgcgagatggatctattaaccttaattagtccatgatttgacaatgtggtgctacaataaccatttgctaatgatggattacttaggtttaatagattcgtctcgtgatttagcctatgggttctgctattaattttgtaattagctcatatttagttcttataattagtatccgaacatccaatgtgacatgctaaagtttaaccctggtatccaaatgaagtcttatgagagtttcatcactccggtggtatatgtacttaggctccgttttcttccaccgacttatttttagcacccgtcacattgaatgtttagatactaattagaagtattaaacgtagactatttacaaaatccattacataagacgaatctaaacggcgagacgaatctattaaacctaattagtccatgatttgacaatgtgttgctacagtaaacatttgctaatgatggattaattaggcttaatagattcgtctcgccgtttagcctccacttatgtaatgggttttctaaacaatctacgtttaatactcctaattagtatctaaatattcaatgtgacacgtgctaaaaataagtcagtggaaggaagagaacgtccccttagttttccatcttattaattgtacgatgaaactgtgcagccagatgattgacaatcgcaatacttcaactagtgggccatgcacatcagcgacgtgtaacgtcgtgagttgctgttcccgtagagaaatatcaactggtgggccacgcacatcagcgtcgtgtaacgtggacggaggagccccgtgacggcgtcgacatcgaacggccaccaaccacggaaccacccgtccccacctctcggaagctccgctccacggcgtcgacatctaacggctaccagcaggcgtacgggttggagtggactccttgcctctttgcgctggcggcttccggaaattgcgtggcggagacgaggcgggctcgtctcacacggcacggaagacgtcacgggttccttccccacctctcctcttccccaccgccataaatagccgaccccctcgcctttctccccaatctcatctcgtctcgtgttgttcggagcacaccacccgccccaaatcgttcttcccgcaagcctcggcgatccttcacccgcttcaaggtacggcgatcgtcttcctcctctagatcggcgtgatctgcaagtagttgatttggtagatggttaggatctgtgcactgaagaaatcatgttagatccgcgatgtttctgttcgtagatggctgggaggtggaatttttgtgtagatctgatatgttctcctgtttatcttgtcacgctcctgcgatttgtggggattttaggtcgttgatctgggaatcgtggggttgcttctaggctgttcgtagatgaggtcgttctcacggtttactggatcattgcctagtagatcagctcgggctttcgtctttgtatatggtgcccatacttgcatctatgatctggttccgtggtgttacctaggtttctgcgcctgattcgtccgatcgattttgttagcatgtggtaaacgtttggtcatggtctgatttagattagagtcgaataggatgatctcgatctagctcttgggattaatatgcatgtgtcaccaatctgttccgtggttaagatgatgaatctatgcttagttaatgggtgtagatatatatgctgctgttcctcaatgatgccgtagcttttacctgagcagcatggttcctcctgttacttaggtagatgcacatgcttatagatcaagatatgtactgctactgttggaattgtttagtatacctgatgatcatccatgctcttgttacttgttttggtatacttggatgatggcatgctgctgctttttgttgatttgagcccatccatatctgcatatgtcacatgattaagatgattacgctgtttctgtatgatgccatagcttttatgtgagcaacatgcatcctcctggttatatgcattaatagatggaagatatctattgctacaatttgatgattattttgtacatacgatgatcaagcatgctcttcatactttgttgatatacttggataatgaaatgctgctgcacgttcattctatagcactaatgatgtgatgaacacgcacgacctgtttgtggcatctgtttgaatgtgttgttgctgttcactagagactgttttattaacctactgctagatacttacccttctgtctgtttattcttttgcaggtcgaccgccggggatccacacgacagcatggtgagtaaaggtgaagagttgattaaagagaacatgcatatgaagttatacatggagggaactgtcaataatcaccactttaagtgtacatcagagggtgagggaaagccatacgagggaacccaaactatgagaatcaaagtagtggagggaggtcctcttccatttgcttttgatatactagcaacaagtttcatgtatggttccaggaccttcattaaccatactcagggaatccctgacttctttaaacagtcttttcctgaaggttttacatgggagagggttaccacttacgaggacggtggagtcttgacagcaacccaggacacttcattacaagatggatgcctaatatacaatgtgaaaattaggggtgtgaatttccctagtaacggaccagttatgcagaagaaaacactaggttgggaagctaatactgaaatgttgtaccctgccgacggaggtttagaaggtagatccgacatggcccttaagctagtcggaggtggacacttgatctgtaactttaaaaccacatataggtctaagaagccagcaaagaatctaaaaatgcctggtgtttactatgtggaccatagactagaaaggataaaagaagcagacaaagaaacttacgtggagcaacatgaggtcgccgtcgctaggtattgcgacttaccttccaagctaggtcacaaattgaactgaggtaccacatggttaacctagacttgtccatcttctggattggccaacttaattaatgtatgaaataaaaggatgcacacatagtgacatgctaatcactataatgtgggcatcaaagttgtgtgttatgtgtaattactagttatctgaataaaagagaaagagatcatccatatttcttatcctaaatgaatgtcacgtgtctttataattctttgatgaaccagatgcatttcattaaccaaatccatatacatataaatattaatcatatataattaatatcaattgggttagcaaaacaaatctagtctaggtgtgttttgcgaattgcggcaagcttggagtcaaagattcaaatagaggacctaacagaactcgccgtaaagactggcgaacagttcatacagagtctcttacgactcaatgacaagaagaaaatcttcgtcaacatggtggagcacgacacgcttgtctactccaaaaatatcaaagatacagtctcagaagaccaaagggcaattgagacttttcaacaaagggtaatatccggaaacctcctcggattccattgcccagctatctgtcactttattgtgaagatagtggaaaaggaaggtggctcctacaaatgccatcattgcgataaaggaaaggccatcgttgaagatgcctctgccgacagtggtcccaaagatggacccccacccacgaggagcatcgtggaaaaagaagacgttccaaccacgtcttcaaagcaagtggattgatgtgatccgcggnnnnnnnnnnnnnnnnnnnnnnnnnnnnnnnnnnnnnnnnnnnnnnnnnnnnnnnnnnnnnnnnnnnnnnnnnnnnnnnnnnnnnnnnnnnnnnnnnnnnnnnnnnnnnnnnnnnncaccggtcagaattctggccttcgcaagacccttcctctatataaggaagttcatttcatttggagaggactatttttacaacaattaccaacaacaacaaacaacaaacaacattacaattactatttacaattacacgactcgggatccgccatggcccagtccaagcacggcctgaccaaggagatgaccatgaagtaccgcatggagggctgcgtggacggccacaagttcgtgatcaccggcgagggcatcggctaccccttcaagggcaagcaggccatcaacctgtgcgtggtggagggcggccccttgcccttcgccgaggacatcttgtccgccgccttcatgtacggcaaccgcgtgttcaccgagtacccccaggacatcgtcgactacttcaagaactcctgccccgccggctacacctgggaccgctccttcctgttcgaggacggcgccgtgtgcatctgcaacgccgacatcaccgtgagcgtggaggagaactgcatgtaccacgagtccaagttctacggcgtgaacttccccgccgacggccccgtgatgaagaagatgaccgacaactgggagccctcctgcgagaagatcatccccgtgcccaagcagggcatcttgaagggcgacgtgagcatgtacctgctgctgaaggacggtggccgcttgcgctgccagttcgacaccgtgtacaaggccaagtccgtgccccgcaagatgcccgactggcacttcatccagcacaagctgacccgcgaggaccgcagcgacgccaagaaccagaagtggcacctgaccgagcacgccatcgcctccggctccgccttgccctccggactcagatctcgatagggtaccacatggttatcgatgggcccactaactatctatactgtaataatgttgtatagccgccggatagctagctagtttagtcattcagcggcgatgggtaataataaagtgtcatccatccatcaccatgcgtggcaacgtgagcaatgacctgattgaacaaattgaaatgaaaagaagaaatatgttatatgtcaacgagatttcctcataatgccactgacgacgtgtgtccaagaaatgtatcagtgatacgtatattcacaatttttttatgacttatactcacaatttgtttttttactacttatactcacaatttgttgtgcgtaccataacaatttcgatcgaatatatatcagaaagttgacgaaagtaagctcactcaaaaagttaaatgggctgcggaagctgcgtcaggcccaagttttggctattctatccggtatccacgattttgatggctgagggacatatgttcgcttggcgcgccnnnnnnnnnnnnnnnnnnnnnnnnnnnnnnnnnnnnnnnnnnnnnnnnnnnnnnnnnnnnnnnnnnnnnnnnnnnnnnnnnnnnnnnnnnnnnnnnnnnnnnnnnnnnnnnnnnnnnnnnnnnnnnnnnnnnnnnnnnnnnnnnnnnnnnnnnnnnnnnnnnnnnnnnnnnnnnnnnnnnnnnnnnnnnnnnnnnnnnnnnnnnnnnnnnnnnnnnnnnnnnnnnnnnnnnnnnnnnnnnnnnnnnnnnnnnnnnnnnnnnnnnnnnnnnnnggtcacccggtccgggcctagaaggccacccgggcaactttattatacaaagttggcattataaaaaagcattgcttatcaatttgttgcaacgaacaggtcactatcagtcaaaataaaatcattatttggagctccatgcatggtagcgttaacgcggccgcgatatcccctatagtgagtcgtattacatggtcatagctgtttcctggcagctctggcccgtgtctcaaaatctctgatgttacattgcacaagataaaaatatatcatcatgaacaataaaactgtctgcttacataaacagtaatacaaggggtgttatgagccatattcaacgggaaacgtcgaggccgcgattaaattccaacatggatgctgatttatatgggtataaatgggctcgcgataatgtcgggcaatcaggtgcgacaatctatcgcttgtatgggaagcccgatgcgccagagttgtttctgaaacatggcaaaggtagcgttgccaatgatgttacagatgagatggtcagactaaactggctgacggaatttatgcctcttccgaccatcaagcattttatccgtactcctgatgatgcatggttactcaccactgcgatccccggaaaaacagcattccaggtattagaagaatatcctgattcaggtgaaaatattgttgatgcgctggcagtgttcctgcgccggttgcattcgattcctgtttgtaattgtccttttaacagcgatcgcgtatttcgtctcgctcaggcgcaatcacgaatgaataacggtttggttgatgcgagtgattttgatgacgagcgtaatggctggcctgttgaacaagtctggaaagaaatgcataaacttttgccattctcaccggattcagtcgtcactcatggtgatttctcacttgataaccttatttttgacgaggggaaattaataggttgtattgatgttggacgagtcggaatcgcagaccgataccaggatcttgccatcctatggaactgcctcggtgagttttctccttcattacagaaacggctttttcaaaaatatggtattgataatcctgatatgaataaattgcagtttcatttgatgctcgatgagtttttctaatcagaattggttaattggttgtaacactggcagagcattacgctgacttgacgggacggcgcaagctcatgaccaaaatcccttaacgtgagttacgcgtcgttccactgagcgtcagaccccgtagaaaagatcaaaggatcttcttgagatcctttttttctgcgcgtaatctgctgcttgcaaacaaaaaaaccaccgctaccagcggtggtttgtttgccggatcaagagctaccaactctttttccgaaggtaactggcttcagcagagcgcagataccaaatactgtccttctagtgtagccgtagttaggccaccacttcaagaactctgtagcaccgcctacatacctcgctctgctaatcctgttaccagtggctgctgccagtggcgataagtcgtgtcttaccgggttggactcaagacgatagttaccggataaggcgcagcggtcgggctgaacggggggttcgtgcacacagcccagcttggagcgaacgacctacaccgaactgagatacctacagcgtgagcattgagaaagcgccacgcttcccgaagggagaaaggcggacaggtatccggtaagcggcagggtcggaacaggagagcgcacgagggagcttccagggggaaacgcctggtatctttatagtcctgtcgggtttcgccacctctgacttgagcgtcgatttttgtgatgctcgtcaggggggcggagcctatggaaaaacgccagcaacgcggcctttttacggttcctggccttttgctggccttttgctcacatgttctttcctgcgttatcccctgattctgtggataaccgtattaccgcctttgagtgagctgataccgctcgccgcagccgaacgaccgagcgcagcgagtcagtgagcgaggaagcggaagagcgcccaatacgcaaaccgcctctccccgcgcgttggccgattcattaatgcagctggcacgacaggtttcccgactggaaagcgggcagtgagcgcaacgcaattaatacgcgtaccgctagccaggaagagtttgtagaaacgcaaaaaggccatccgtcaggatggccttctgcttagtttgatgcctggcagtttatggcgggcgtcctgcccgccaccctccgggccgttgcttcacaacgttcaaatccgctcccggcggatttgtcctactcaggagagcgttcaccgacaaacaacagataaaac

SEQ ID NO: 145 - DNA, 20839 bp, unidentified
  source 1..20839: mol_type = other DNA; note = Artificial
gtttacccgccaatatatcctgtcaaacactgcggccgcacttgaccgcggatggagccggagctgtggtgaggccatcgacgggaggtgggggagaacacagtctcagtgttctttgtgagtccgcaaggtttttagcttttctgtattaattaaggttgctgttggctgtagaatacggtcgtggaagagctgtatcggtagctactacgtaagctattatatactggaagtctggagctcgtcgatctccggtcgtcttcctccatttctcctcgtcttgctttgactgctgctaccatttgcttctgttttctgatgaagcatgccatgtcggccaccagtgtttgtgtggtttttgcagggaatggctttcaagtgctgtgattgaatggccctcgtcgtcctcggctgagctcacatggacgcgtcatgtgagtgagatatatgatcatatgatgagtggggttcgggtgagtgcgtacttgaagtaggatcccgctttcactcattcattcattggcctttaaaccgggaaattttcgcgaggagatggagggaagcaagcagggtgacgagtgcagagtgccgcgagcgctttgtcaaaaggcaccgccgtaggcaaaaaaatcaatggccctgactgactcgatggtagtactactgtagagactagagagggttgctccccatatcttcgtgtgacttttactccagcattgcatttccgtcattgagacgttaattaatagcagctttcgggacagatgactgtggccatgtttcgtcacggccgcttcgtgccagctgggggtactatagtactgtgattttgttagtaaaaactttcattaggccaccattgacgaccgggccttcgcttttgctgcgctaattaaccatttcccggcgaccgaagggaacatgaacatgccccgacacatgagggcatgaggactagtgttctccctgtcgttcgttgacttgactagtgatagtttaaacgctcttcaactggaagagcggttactaccggttcactagctagctgctaatcgagctagttaccctatgaggtgacatgaagcgctcacggttactatgacggttagcttcacgactgttggtggcagtagcgtacgacttagctatagttccggacttacctagctaataacttcgtatagcatacattatacgaagttatggttaccgagctccaccttgctagttggatattacctcttctcttcaaagtatccttgaacgctcaccggttatcaaatctctacactatagctctgtagtcttgctagatagttagttctttagctctctctagaggttcacaaactcaatacaacacacagtggagtagggtattacgctccggcggcccgaaccactctaaatccttgtgtcctcgtgtgctcttccaccattaatgactgtaattgcagggacacgaagagttgtagcgcttttgccaacaagatccgctatatgctagtagagtggaacctgcacagcaacaagcatccaataatctgagaataagaattatgtgtggtgatggttctcatctctgcaactcgccattttcgcgagagaaccaaatccaagttggtgaagatcatgatttgggctcatgggctggcatagtagctattacctttgcaattgtggttcgaatctatccgatattctccttttcagggagagctaatgcttatgcttattgggtattttggtttgacactgcttcacgcccaaaaaaaggcaactatgtctgagttggatatggcccaaaaaaaggcagctatgtctgagttggatatggaagtcttctttcgtttagggtgaagtaagaccaagctcatgagcttattatcttaggtcggaacaaattagttgataggcatggcacatttatcaaattataatgattttaacagaaaagcaacacctctttttcagcagcaccagctttgcaagctgcaattgacactccaagcatagtatttgctccaaactcagcctgcatttcgcacaatatcatatctatttccatttggataaaatatattttccagaaatatgggaacagaatcaagatacagaaaaaagttgtggtagtagtggtaagtggaaacacaagtacagtgaaaagatagcattatttctgaacagtcaaattaaccgaaataagtagtatcacatactgcccctaaattgactacacccaatgtaaagaattgcttgagcatattgagccatcagttgtttgtttgtgtaacggatttgacaatgcagagttcaggagcaaaaaaccgcaaaggagagaaagagggaaaggatctcctagtatcccaccttgtggcgcgccctgtcaagtgcatgatggcctggtcgatctgcgtctgctgctgcggttccatcccaacgagtgcctccgacaccttgtcgttgatcacccgcaccgcgtaggcgacccccctggcgaggaacttccgcctctcggaggccccggccgcgtcggcggcggcgccctcgagcgcgcccacgctagccgtagatgctcggtgcacggccttgttggtgtgcaactcgacctcaacggccggtgcgctacgcccgtcaaggatctggcgcgcccgcaccctcgtgatcacggtgggcgcctcccgcctcatgtggccgacgatgaaaagcgccgggttaggggccttggcgcgcaccgccgtattcagggcctcctcgctcttgcgcgagagcaggtgcttccccaggtactcctgcactgacaaggctgccacagcggtggaatttgtcctcacgacttcgccacgtcgtcctcacctccctggcttcccacgactccgccgtatcgaggtgctcggtgggtcgtcttaatccgaagtccgaactaggaagacgagacagagaggtctgaggaatgggcctcgtttgatgttgagctgaattatttttccagcataagcccaggtcttggtccatgaacaaaattactagaaacccagcccagtactacgatctaaaagagggactgccactggatagctctctctagcattctccacgctccaatacagcggcgtcgtgtctatccgggtctatccgcgaacacgtgagaactctccagaaactgctttctcctccacttcatctctctcgctttccctctataaaaagaccccttctaggaattgagggagacagcaagcaccaagcagcgatccgaagctcaatcaattcactcaaacctcttccccaaatcttcgattagatcttcgttgacaagaagactagaaccgaacctgacatgtccaacctgctcacggttcaccagaaccttccggctcttccagtggacgcgacgtccgatgaagtcaggaagaacctcatggacatgttccgcgacaggcaagcgttcagcgagcacacctggaagatgctgctctccgtctgccgctcctgggctgcatggtgcaagctgaacaacaggaagtggttccccgctgagcccgaggacgtgagggattaccttctgtacctgcaagcgcgaggtttgtttctgcttctacctttgatatatatataataattatcattaattagtagtaatataatatttcaaatatttttttcaaaataaaagaatgtagtatatagcaattgcttttctgtagtttataagtgtgtatattttaatttataacttttctaatatatgaccaaaacatggtgatgcctaggtctggcagtgaagaccatccagcaacaccttggacaactgaacatgcttcacaggcgctccggcctcccgcgccccagcgactcgaacgccgtgagcctcgtcatgcgccgcatcaggaaggaaaacgtcgatgccggcgaaagggcaaagcaggccctcgcgttcgagaggaccgatttcgaccaggtccgcagcctgatggagaacagcgacaggtgccaggacattaggaacctggcgttcctcggaattgcatacaacacgctcctcaggatcgcggaaattgcccgcattcgcgtgaaggacattagccgcaccgacggcggcaggatgcttatccacattggcaggaccaagacgctcgtttccaccgcaggcgtcgaaaaggccctcagcctcggagtgaccaagctcgtcgaacgctggatctccgtgtccggcgtcgcggacgacccaaacaactacctcttctgccgcgtccgcaagaacggggtggctgcccctagcgccaccagccaactcagcacgagggccttggaaggtattttcgaggccacccaccgcctgatctacggcgcgaaggatgacagcggtcaacgctacctcgcatggtccgggcactccgcccgcgttggagctgctagggacatggcccgcgccggtgtttccatccccgaaatcatgcaggcgggtggatggacgaacgtgaacattgtcatgaactacattcgcaaccttgacagcgagacgggcgcaatggttcgcctcctggaagatggtgactgaggtacccaacctagacttgtccatcttctggattggccaacttaattaatgtatgaaataaaaggatgcacacatagtgacatgctaatcactataatgtgggcatcaaagttgtgtgttatgtgtaattactagttatctgaataaaagagaaagagatcatccatatttcttatcctaaatgaatgtcacgtgtctttataattctttgatgaaccagatgcatttcattaaccaaatccatatacatataaatattaatcatatataattaatatcaattgggttagcaaaacaaatctagtctaggtgtgttttgcgatccgatatcgatcaccttgctagttggatattacctcttctcttcaaagtatccttgaacgctcaccggttatcaaatctctacactatagctctgtagtcttgctagatagttagttctttagctctcgggccctggccgaagcttacactgatagtttaaactgaaggcgggaaacgacaatctgatcatgagcggagaattaagggagtcacgttatgacccccgccgatgacgcgggacaagccgttttacgtttggaactgacagaaccgcaacgattgaaggagccactcagccgcgggtttctggagtttaatgagctaagcacatacgtcagaaaccattattgcgcgttcaaaagtcgcctaaggtcactatcagctagcaaatatttcttgtcaaaaatgctccactgacgttccataaattcccctcggtatccaattagagtctcatattcactcccatggcggccaatgcgggcggcggtggagcgggaggaggcagcggcagcggcagcgtggctgcgccggcggtgtgccgccccagcggctcgcggtggacgccgacgccggagcagatcaggatgctgaaggagctctactacggctgcggcatccggtcgcccagctcggagcagatccagcgcatcaccgccatgctgcggcagcacggcaagatcgagggcaagaacgtcttctactggttccagaaccacaaggcccgcgagcgccagaagcgccgcctcaccagcctcgacgtcaacgtgcccgccgccggcgcggccgacgccaccaccagccaactcggcgtcctctcgctgtcgtcgccgccgccttcaggcgcggcgcctccctcgcccaccctcggcttctacgccgccggcaatggcggcggatcggctgtgctgctggacacgagttccgactggggcagcagcggcgctgctatggccaccgagacatgcttcctgcaggactacatgggcgtgacggacacgggcagctcgtcgcagtggccacgcttctcgtcgtcggacacgataatggcggcggccgcggcgcgggcggcgacgacgcgggcgcccgagacgctccctctcttcccgacctgcggcgacgacggcggcagcggtagcagcagctacttgccgttctggggtgccgcgtccacaactgccggcgccacttcttccgttgcgatccaacagcaacaccagctgcaggagcagtacagcttttacagcaacagcaacagcacccagctggccggcaccggcaaccaagacgtatcggcaacagcagcagcagccgccgccctggagctgagcctcagctcatggtgctccccttaccctgctgcagggagtatgtgagatcaacgcgagctgccactgctcttcactgatgtctctggaatggaaggaggaggaagtgagaacagatcattcgacaaagcagcattagtccgttgatcggtggaagaccactcgtcagtgttgagttgaatgtttgatcaataaaatacggcaatgctgtaagggttgttttttatgccattgataatacactgtactgttcagttgttgaactctatttcttagccatgccaagtgcttttcttattttgaataacattacagcaaaaagttgaaagacaaaaaaaaaaacccccgaacagagtgctttgggtcccaagcttctttagactgtgttcggcgttccccctaaatttctccccctatatctcactcacttgtcacatcagcgttctctttccccctatatctccacgctctacagcagttccacctatatcaaacctctataccccaccacaacaatattatatactttcatcttcaactaactcatgtaccttccaatttttttctactaataattatttacgtgcacagaaacttagcaaggagagagagagcgggaatttaaatgctcggcgttaggcttttagtccgctaggtggctagaccgaggttaggacgctagttcactaggggcctagtggtgttttaagacgtcacggtcaccgcggccgcatcgagcagctggcttgtggggaccagacaaaaaaggaatggtgcagaattgttaggcgcacctaccaaaagcatctttgcctttattgcaaagataaagcagattcctctagtacaagtggggaacaaaataacgtggaaaagagctgtcctgacagcccactcactaatgcgtatgacgaacgcagtgacgaccacaaaactcgagcaacgagatcatgagccaatcaaagaggagtgatgtagacctaaagcaataatggagccatgacgtaagggcttacgcccatacgaaataattaaaggctgatgtgacctgtcggtctctcagaacctttactttttatgtttggcgtgtatttttaaatttccacggcaatgacgatgtgaccgtcgacccactaaaacattgctttgtcaaaagctaaaaaagatgatgcccgacagccacttgtgtgaagcatgagaagccggtccctccactaagaaaattagtgaagcatcttccagtggtccctccactcacagctcaatcagtgagcaacaggacgaaggaaatgacgtaagccatgacgtctaatcccattcgaaacgcgtggaccgaagcttgcatgcctgcagtgcagcgtgacccggtcgtgcccctctctagagataatgagcattgcatgtctaagttataaaaaattaccacatattttttttgtcacacttgtttgaagtgcagtttatctatctttatacatatatttaaactttactctacgaataatataatctatagtactacaataatatcagtgttttagagaatcatataaatgaacagttagacatggtctaaaggacaattgagtattttgacaacaggactctacagttttatctttttagtgtgcatgtgttctcctttttttttgcaaatagcttcacctatataatacttcatccattttattagtacatccatttagggtttagggttaatggtttttatagactaatttttttagtacatctattttattctattttagcctctaaattaagaaaactaaaactctattttagtttttttatttaataatttagatataaaatagaataaaataaagtgactaaaaattaaacaaataccctttaagaaattaaaaaaactaaggaaacatttttcttgtttcgagtagataatgccagcctgttaaacgccgtcgacgagtctaacggacaccaaccagcgaaccagcagcgtcgcgtcgggccaagcgaagcagacggcacggcatctctgtcgctgcctctggacccctctcgagagttccgctccaccgttggacttgctccgctgtcggcatccagaaattgcgtggcggagcggcagacgtgagccggcacggcaggcggcctcctcctcctctcacggcaccggcagctacgggggattcctttcccaccgctccttcgctttcccttcctcgcccgccgtaataaatagacaccccctccacaccctctttccccaacctcgtgttgttcggagcgcacacacacacaaccagatctcccccaaatccacccgtcggcacctccgcttcaaggtacgccgctcgtcctcccccccccccctctctaccttctctagatcggcgttccggtccatgcatggttagggcccggtagttctacttctgttcatgtttgtgttagatccgtgtttgtgttagatccgtgctgctagcgttcgtacacggatgcgacctgtacgtcagacacgttctgattgctaacttgccagtgtttctctttggggaatcctgggatggctctagccgttccgcagacgggatcgatttcatgattttttttgtttcgttgcatagggtttggtttgcccttttcctttatttcaatatatgccgtgcacttgtttgtcgggtcatcttttcatgcttttttttgtcttggttgtgatgatgtggtctggttgggcggtcgttctagatcggagtagaattctgtttcaaactacctggtggatttattaattttggatctgtatgtgtgtgccatacatattcatagttacgaattgaagatgatggatggaaatatcgatctaggataggtatacatgttgatgcgggttttactgatgcatatacagagatgctttttgttcgcttggttgtgatgatgtggtgtggttgggcggtcgttcattcgttctagatcggagtagaatactgtttcaaactacctggtgtatttattaattttggaactgtatgtgtgtgtcatacatcttcatagttacgagtttaagatggatggaaatatcgatctaggataggtatacatgttgatgtgggttttactgatgcatatacatgatggcatatgcagcatctattcatatgctctaaccttgagtacctatctattataataaacaagtatgttttataattattttgatcttgatatacttggatgatggcatatgcagcagctatatgtggatttttttagccctgccttcatacgctatttatttgcttggtactgtttcttttgtcgatgctcaccctgttgtttggtgttacttctgcaggtcgactttaacttagcctaggatccatggccactgtgaacaactggctcgctttctccctctccccgcaggagctgccgccctcccagacgacggactccacactcatctcggccgccaccgccgaccatgtctccggcgatgtctgcttcaacatcccccaagattggagcatgaggggatcagagctttcggcgctcgtcgcggagccgaagctggaggacttcctcggcggcatctccttctccgagcagcatcacaaggccaactgcaacatgatacccagcactagcagcacagtttgctacgcgagctcaggtgctagcaccggctaccatcaccagctgtaccaccagcccaccagctcagcgctccacttcgcggactccgtaatggtggcttcctcggccggtgtccacgacggcggtgccatgctcagcgcggccgccgctaacggtgtcgctggcgctgccagtgccaacggcggcggcatcgggctgtccatgattaagaactggctgcggagccaaccggcgcccatgcagccgagggtggcggcggctgagggcgcgcaggggctctctttgtccatgaacatggcggggacgacccaaggcgctgctggcatgccacttctcgctggagagcgcgcacgggcgcccgagagtgtatcgacgtcagcacagggtggagccgtcgtcgtcacggcgccgaaggaggatagcggtggcagcggtgttgccggcgctctagtagccgtgagcacggacacgggtggcagcggcggcgcgtcggctgacaacacggcaaggaagacggtggacacgttcgggcagcgcacgtcgatttaccgtggcgtgacaaggcatagatggactgggagatatgaggcacatctttgggataacagttgcagaagggaagggcaaactcgtaagggtcgtcaagtctatttaggtggctatgataaagaggagaaagctgctagggcttatgatcttgctgctctgaagtactggggtgccacaacaacaacaaattttccagtgagtaactacgaaaaggagctcgaggacatgaagcacatgacaaggcaggagtttgtagcgtctctgagaaggaagagcagtggtttctccagaggtgcatccatttacaggggagtgactaggcatcaccaacatggaagatggcaagcacggattggacgagttgcagggaacaaggatctttacttgggcaccttcagcacccaggaggaggcagcggaggcgtacgacatcgcggcgatcaagttccgcggcctcaacgccgtcaccaacttcgacatgagccgctacgacgtgaagagcatcctggacagcagcgccctccccatcggcagcgccgccaagcgcctcaaggaggccgaggccgcagcgtccgcgcagcaccaccacgccggcgtggtgagctacgacgtcggccgcatcgcctcgcagctcggcgacggcggagccctggcggcggcgtacggcgcgcactaccacggcgccgcctggccgaccatcgcgttccagccgggcgccgccagcacaggcctgtaccacccgtacgcgcagcagccaatgcgcggcggcgggtggtgcaagcaggagcaggaccacgcggtgatcgcggccgcgcacagcctgcaggacctccaccacctgaacctgggcgcggccggcgcgcacgactttttctcggcagggcagcaggccgccgccgctgcgatgcacggcctgggtagcatcgacagtgcgtcgctcgagcacagcaccggctccaactccgtcgtctacaacggcggggtcggcgacagcaacggcgccagcgccgtcggcggcagtggcggtggctacatgatgccgatgagcgctgccggagcaaccactacatcggcaatggtgagccacgagcaggtgcatgcacgggcctacgacgaagccaagcaggctgctcagatggggtacgagagctacctggtgaacgcggagaacaatggtggcggaaggatgtctgcatgggggactgtcgtgtctgcagccgcggcggcagcagcaagcagcaacgacaacatggccgccgacgtcgggcatggcggcgcgcagctcttcagtgtctggaacgacacttaagcgtacctagtggtacctgacatcttatagtctgcaacctctcgtgtctgaattcctatctttatcaagtgttattgcttccacgactataggacagctttcgtcgaaagcttttgctcatgtgatctcgaaggattcatctagtctgatttttcgtgacttgtatcggttttattggattcatccaacatatatcaataaaaaatgagttgtgtttcctttcttcctagttcagttaaaattatttccctcctgcgcttgtgctgtaattgtctgtgtacctgttgtttgtgactgtgttagttcccttggatatgatttcgtatttgatatgtacatggagatagcttagcttcattattggagtatgaagttagtatgacatagtcactctcctggaaaattgacactgcaaaccatatttttattctgaaccacaaatcctagtcagtccgctggcatatgccgtccgtttgctgaatccagaacgtgggtttggagatgtacggctgagatgcctctatgcgaaggggatttcgtggtgaaacgagatgggagtagagcaacgcccgtggaagatgcttcaaacttccacacttttgagcaacgatcggcagtagtaaggtagacgatttcaagatcaaagcatatgaagataaacaacatcaacaacaaaatttgttggggttctatagagagaaacagagctacatacatacactgttttgtatctaccatctgagatgatgaaaagatgaaaaactaaagaatgccccggcgccaacgccaggacacgccgcgcgcgcgtcacccgagccatctcttgacccagccggcgctgtatatttacacacgttgcagcatcgatcaccacctgttcgatcgcgtcgccgtcaccggcgcgccgcgacttattgaactagtctagggcgcggctaacaacctagcttagattgccttgtctaaacccttaggctaacgcgccactctagacgtgcgcacgataacttcgtatagcatacattatacgaagttataacagcggaccgggttaccgaattcctgcccttaaggccaattgttcaagattcattcaacaattgaaacatctcccatgattaaatcagtataaggttgctatggtcttgcttgacaaagtttttttttgagggaatttcaactaaatttttgagtgaaactatcaaatactgattttaaaaaatttttataaaaggaagcgcagagataaaaggccatctatgctacaaaagtacccaaaaatgtaatcctaaagtatgaattgcattttttttttgtttggacgaaaggaaaggagtattaccacaagaatgatatcatcttcatatttagatcttttttgggtaaagcttgagattctctaaatatagagaaatcagaagaaaaaaaaaccgtgttttggtggttttgatttctagcctccacaataactttgacggcgtcgacaagtctaacggacaccaagcagcgaaccaccagcgccgagccaagcgaagcagacggccgagacgttgacaccttcggcgcggcatctctcgagagttccgctccggcgctccacctccaccgctggcggtttcttattccgttccgttccgcctcctgctctgctcctctccacaccacacggcacgaaaccgttacggcaccggcagcacccagcacgggagaggggattcctttcccaccgttccttccctttccgccccgccgctataaatagccagccccatccccagcttttttccccaatctcatctcctctctcctgttgttcggagcacacgcacaatccgatcgatccccaaatccccttcgtctctcctcgcgagcctcgtggatcccagcttcaaggtacggcgatcgatcatcccccctccttctctctaccttcttttctctagactacatcggatggcgatccatggttagggcctgctagtttcccttcctgttttgtcgatggctgcgaggcacaatagatctgatggcgttatgacggctaacttgtcatgttgttgcgatttatagtccctttaggagatcagtttaatttctcggatggttcgagatcggtggtccatggttagtaccctaagatccgcgctgttagggttcgtagatggaggcgacctgttctgattgttaacttgtcagtacctgggaaatcctgggatggttctagctcgtccgcagatgagatcgatttcatgatcctctgtatcttgtttcgttgcctaggttccgtctaatctatccgtggtatgatgtagatgttttgatcgtgctaactacgtcttgtaaagttaattgtcaggtcataatttttagcatgcctttttttttgtttggttttgtctaattgggctgtcgttctagatcagagtagaagactgttccaaactacctgctggatttattgaacttggatctgtatgtgtgtcacatatcttcataaattcatgattaagatggattgaaatatcttttatctttttggtatggatagttctatatgttggtgtggctttgttagatgtatacatgcttagatacatgaagcaacgtgctgctactgtttagtaattgctgttcatttgtctaataaacagataaggatatgtatttatgttgctgttggttttgctggtactttgttggatacaaatgcttcaatacagaaaacagcatgctgctacgatttaccatttatctaatcttatcatatgtctaatctaataaacaaacatgcttttaaattatcttcatatgcttggatgatggcatacacagcggctatgtgtggttttttaaatacccagcatcatgggcatgcatgacactgctttaatatgctttttatttgcttgagactgtttcttttgtttatactgaccctttagttcggtgactcttctgcaggtcgactttaacttagcctaggatccatggcccagtccaagcacggcctgaccaaggagatgaccatgaagtaccgcatggagggctgcgtggacggccacaagttcgtgatcaccggcgagggcatcggctaccccttcaagggcaagcaggccatcaacctgtgcgtggtggagggcggccccttgcccttcgccgaggacatcttgtccgccgccttcatgtacggcaaccgcgtgttcaccgagtacccccaggacatcgtcgactacttcaagaactcctgccccgccggctacacctgggaccgctccttcctgttcgaggacggcgccgtgtgcatctgcaacgccgacatcaccgtgagcgtggaggagaactgcatgtaccacgagtccaagttctacggcgtgaacttccccgccgacggccccgtgatgaagaagatgaccgacaactgggagccctcctgcgagaagatcatccccgtgcccaagcagggcatcttgaagggcgacgtgagcatgtacctgctgctgaaggacggtggccgcttgcgctgccagttcgacaccgtgtacaaggccaagtccgtgccccgcaagatgcccgactggcacttcatccagcacaagctgacccgcgaggaccgcagcgacgccaagaaccagaagtggcacctgaccgagcacgccatcgcctccggctccgccttgccctccggactcagatctcgatagggtaccaatggccagttaacagatccagctgctgctgttctagggttcacaagtctgcctatttgtcttccccaatggagctatggttgtctggtctggtccttggtcgtgtcccgtttcattgtgtactatttacctgtaatgtgtatccttaagtctggtttgatggtgtctgaaacgttttgctgtggtagagcagcatggaagaactataatgaataagtgatccctaatcattgtgtccaaattttgcttctgctatacccttttgtgctgtttcttatgttttgcttaaaaatttgatctgacaaacaaatttgtctaaattatgctcttgttctgactgtgtactgtacacatttgtattgctaccggtttggcacatagttttctctttgattgcagatcaaacccttctgattgcagattgcttggctatggctgatgtgctcactgttcttctttagcttgtatattgctgatggtggcttggctacggctgaaaaagttgctgctgcgccgacttggcaactgttgctccagtaatgctttgtcctctcttcctagccgccgacttggcacttggcagctgttgctcctgtaatgcgttgttatctcttatctcttgagatgtactatgattttgaggctgtttgacttgtgccagattgccagtgctgatgctatattatctcaggtttttatgctagtatatgttttactgtgtgctgcctgtgtcgagttacgtaatctattgaaccgctatgcgtgttgatgccctgttgttgcttgccagattgatgcccctgttgcttgcagcttgcaagctgtagtgaaatcctaaaattcgaaaccaaatctattctgaacttttgaagatctgtgatgtccggaagaaaagattcaaacagataaacgggactctccagaatctataaaataaatgatcgacaaacgctttgctttggtaggcttcctagttagttagcggaccgaagcttcggtccgggcctagaaggccagcttcggccgcccctcggtaccctgggatctgcccttactttaacgcctctaaccaacacccctttatctttataaggaacaataaacagaatttgccccactgttctaaatcacctaataatatccccagctaaaaacaataaaggtttcctagaattaagacaagcatgactgttcctccaggagggtttggaacattgttgcagtcttgcagatacgggcgaagggtgagaaacagagcggagggctggaggtgacctcggtagtcgacgccggagttgagcttgacaacgacggggcggcccctgatggacttgaggaagtccgatggcgtcttcaccgtcccgccggcgcccgaggcgggcctgtcgctgccgccgccgccgctgctcatcttgcgcgctgtgcccccggcggtgtccctgtgttgcggatcgcgggtgggccaggtggatgcgagggcgacccgtttggactccggccggagccgccggatccctggtcggtgtcagtgccgtttactctgggccccacgtgtcagtaccgtctgtagatgacaacaacccgtcgtccacagtcatgtccaaaatatcctttcttcttttttttcgattcggatatctatcttccttttttttttccaaaaatcttcttgacgcaccagcgcgcacgtttgtggtaaacgccgacacgtcggtcccacgtcgatagaccccacccaccagtgagtagcgtgtacgtattcgggggtgacggacgtgtcgccgtcgtcttgctagtcccattcccatctgagccacacatctctgaacaaaaaaaaggagggaggcctccacgcacatccccctccgtgccacccgccccaaaccctcgcgccgcctccgagacagccgccgcaaccatggccaccgccgccgccgcgtctaccgcgctcactggcgccactaccgctgcgcccaaggcgaggcgccgggcgcacctcctggccacccgccgcgccctcgccgcgcccatcaggtgctcagcggcgtcacccgccatgccgatggctcccccggccaccccgctccggccgtggggccccaccgagccccgcaagggtgctgacatcctcgtcgagtccctcgagcgctgcggcgtccgcgacgtcttcgcctaccccggcggcgcgtccatggagatccaccaggcactcacccgctcccccgtcatcgccaaccacctcttccgccacgagcaaggggaggcctttgccgcctccggctacgcgcgctcctcgggccgcgtcggcgtctgcatcgccacctccggccccggcgccaccaacctagtctccgcgctcgccgacgcgctgctcgattccgtccccatggtcgccatcacgggacaggtggcgcgacgcatgattggcaccgacgccttccaggagacgcccatcgtcgaggtcacccgctccatcaccaagcacaactacctggtcctcgacgtcgacgacatcccccgcgtcgtgcaggaggctttcttcctcgcctcctctggtcgaccagggccggtgcttgtcgacatccccaaggacatccagcagcagatggcggtgcctgtctgggacaagcccatgagtctgcctgggtacattgcgcgccttcccaagccccctgcgactgagttgcttgagcaggtgctgcgtcttgttggtgaatcgcggcgccctgttctttatgtgggcggtggctgcgcagcatctggtgaggagttgcgacgctttgtggagctgactggaatcccggtcacaactactcttatgggcctcggcaacttccccagcgacgacccactgtctctgcgcatgctaggtatgcatgggacggtgtatgcaaattatgcagtggataaggccgatctgttgcttgcacttggtgtgcggtttgatgatcgcgtgacagggaagattgaggcttttgcaagcagggctaagattgtgcacgttgatattgatccggctgagattggcaagaacaagcagccacatgtgtccatctgtgcagatgttaagcttgctttgcagggcatgaatgctcttcttgaaggaagcacatcaaagaagagctttgactttggctcatggaacgatgagttggatcagcagaagagggaattcccccttgggtataaaacatctaatgaggagatccagccacaatatgctattcaggttcttgatgagctgacgaaaggcgaggccatcatcggcacaggtgttgggcagcaccagatgtgggcggcacagtactacacttacaagcggccaaggcagtggttgtcttcagctggtcttggggctatgggatttggtttgccggctgctgctggtgcttctgtggcaaacccaggtgtcactgttgttgacatcgatggagatggtagctttctcatgaacgttcaggagctagctatgatccgaattgagaacctcccagtgaaggtctttgtgctaaacaaccagcacctggggatggtggtgcagttggaggacaggttctataaggccaacagagcgcacacatacttgggaaacccagagaatgaaagtgagatatatccagatttcgtgacgatcgccaaagggttcaacattccagccgtccgtgtgacaaagaagaacgaagtccgcgcagcgataaagaagatgctcgagactccagggccgtacctcttggatataatcgtcccacaccaggagcatgtgttgcctatgatccctagtggtggggctttcaaggatatgatcctggatggtgatggcaggactgtgtactgacttcgaataggtacccggggatcctctagtgccgtgggtcgtttaagctgccgctgtacctgtgtcgtctggtgccttctggtgtacctgggaggttgtcgtctatcaagtatctgtggttggtgtcatgagtcagtgagtcccaatactgttcgtgtcctgtgtgcattatacccaaaactgttatgggcaaatcatgaataagcttgatgttcgaacttaaaagtctctgctcaatatggtattatggttgtttttgttcgtctcctaatatttgcctgggatcaaattttattggctggtgttcatttgacctccatgttcttgctaggctccattttttactctacagccataatatgtttgattgtttggtttgttctttgttgtacacctggttctgtcgagcttagttttcgacactggcttacagcttaacatgttgctattttattgggttctgattgctattttattgggttctgattgctagtttttgctgaatccaaaaaccatgttatttatttaagcgatccaggttattattatgatggtggctaagtttttttttttccaagggtaaattttctggattctccagtgtttctgtggccgaattcaatcactagagtcgacctgcaaagcttcggtccgggcctagaaggcccgcgccacttacgcttgattccgatgacttcgtaggttcctagctcaagccgctcgtgtccaagcgtcacttacgattagctaatgattacggcatctaggaccgactagttcttatgtgcttctagtctccaaatgtggttgatagttattttgctctaagatcaacagtaatgaagtataaatcatcgttgtggtgtgctactcggttaattgagcattaacacacacaaacatgacgaggatggtataatctccaaaaatgtgtactttgttaggtgggaccctatagccttgattaatgtgctatgttaggcatgcctggaaacgtgtgacgcatatgttttgtgaacctgttgatattatatgtgcttttatattaccatattttattaaaatactaatatttattactagtaagatataacattctatctagcttaaaaactaaccataaatattccataataactagatttaccaaactaatatactaaatatacataataaatacaaaattaacaagacaataatcaatatttatgagcttaatatatttagacattatggttggtcgacgataatcatgctaacttttcgtaattgcttgattgaaatatgcttagaataatgcctctttgttctacatggcaaatagggaccattatggtgtaacaccctgggaaccacaaacaccccgaaatgctactaaactacacaactaaccttcatatataaaatttcgacagcatctcctttgaaaatttgcatagacgtggaagcaacagagtataaacagatctgcgtttaaacgtgcaagcgctactagacaattcagtacattaaaaacgtccgcaatgtgttattaagttgtctaagcgtcaatttgtttacaccacaatatatcctgcca

SEQ ID NO: 146 - DNA, 20851 bp, unidentified
  source 1..20851: mol_type = other DNA; note = Artificial
gtttacccgccaatatatcctgtcaaacactgcggccgcacttgaccgcggatggagccggagctgtggtgaggccatcgacgggaggtgggggagaacacagtctcagtgttctttgtgagtccgcaaggtttttagcttttctgtattaattaaggttgctgttggctgtagaatacggtcgtggaagagctgtatcggtagctactacgtaagctattatatactggaagtctggagctcgtcgatctccggtcgtcttcctccatttctcctcgtcttgctttgactgctgctaccatttgcttctgttttctgatgaagcatgccatgtcggccaccagtgtttgtgtggtttttgcagggaatggctttcaagtgctgtgattgaatggccctcgtcgtcctcggctgagctcacatggacgcgtcatgtgagtgagatatatgatcatatgatgagtggggttcgggtgagtgcgtacttgaagtaggatcccgctttcactcattcattcattggcctttaaaccgggaaattttcgcgaggagatggagggaagcaagcagggtgacgagtgcagagtgccgcgagcgctttgtcaaaaggcaccgccgtaggcaaaaaaatcaatggccctgactgactcgatggtagtactactgtagagactagagagggttgctccccatatcttcgtgtgacttttactccagcattgcatttccgtcattgagacgttaattaatagcagctttcgggacagatgactgtggccatgtttcgtcacggccgcttcgtgccagctgggggtactatagtactgtgattttgttagtaaaaactttcattaggccaccattgacgaccgggccttcgcttttgctgcgctaattaaccatttcccggcgaccgaagggaacatgaacatgccccgacacatgagggcatgaggactagtgttctccctgtcgttcgttgacttgactagtgatagtttaaacgctcttcaactggaagagcggttactaccggttcactagctagctgctaatcgagctagttaccctatgaggtgacatgaagcgctcacggttactatgacggttagcttcacgactgttggtggcagtagcgtacgacttagctatagttccggacttacctagctaataacttcgtatagcatacattatacgaagttatggttaccgagctccaccttgctagttggatattacctcttctcttcaaagtatccttgaacgctcaccggttatcaaatctctacactatagctctgtagtcttgctagatagttagttctttagctctctctagaggttcacaaactcaatacaacacacagtggagtagggtattacgctccggcggcccgaaccactctaaatccttgtgtcctcgtgtgctcttccaccattaatgactgtaattgcagggacacgaagagttgtagcgcttttgccaacaagatccgctatatgctagtagagtggaacctgcacagcaacaagcatccaataatctgagaataagaattatgtgtggtgatggttctcatctctgcaactcgccattttcgcgagagaaccaaatccaagttggtgaagatcatgatttgggctcatgggctggcatagtagctattacctttgcaattgtggttcgaatctatccgatattctccttttcagggagagctaatgcttatgcttattgggtattttggtttgacactgcttcacgcccaaaaaaaggcaactatgtctgagttggatatggcccaaaaaaaggcagctatgtctgagttggatatggaagtcttctttcgtttagggtgaagtaagaccaagctcatgagcttattatcttaggtcggaacaaattagttgataggcatggcacatttatcaaattataatgattttaacagaaaagcaacacctctttttcagcagcaccagctttgcaagctgcaattgacactccaagcatagtatttgctccaaactcagcctgcatttcgcacaatatcatatctatttccatttggataaaatatattttccagaaatatgggaacagaatcaagatacagaaaaaagttgtggtagtagtggtaagtggaaacacaagtacagtgaaaagatagcattatttctgaacagtcaaattaaccgaaataagtagtatcacatactgcccctaaattgactacacccaatgtaaagaattgcttgagcatattgagccatcagttgtttgtttgtgtaacggatttgacaatgcagagttcaggagcaaaaaaccgcaaaggagagaaagagggaaaggatctcctagtatcccaccttgtggcgcgccctgtcaagtgcatgatggcctggtcgatctgcgtctgctgctgcggttccatcccaacgagtgcctccgacaccttgtcgttgatcacccgcaccgcgtaggcgacccccctggcgaggaacttccgcctctcggaggccccggccgcgtcggcggcggcgccctcgagcgcgcccacgctagccgtagatgctcggtgcacggccttgttggtgtgcaactcgacctcaacggccggtgcgctacgcccgtcaaggatctggcgcgcccgcaccctcgtgatcacggtgggcgcctcccgcctcatgtggccgacgatgaaaagcgccgggttaggggccttggcgcgcaccgccgtattcagggcctcctcgctcttgcgcgagagcaggtgcttccccaggtactcctgcactgacaaggctgccacagcggtggaatttgtcctcacgacttcgccacgtcgtcctcacctccctggcttcccacgactccgccgtatcgaggtgctcggtgggtcgtcttaatccgaagtccgaactaggaagacgagacagagaggtctgaggaatgggcctcgtttgatgttgagctgaattatttttccagcataagcccaggtcttggtccatgaacaaaattactagaaacccagcccagtactacgatctaaaagagggactgccactggatagctctctctagcattctccacgctccaatacagcggcgtcgtgtctatccgggtctatccgcgaacacgtgagaactctccagaaactgctttctcctccacttcatctctctcgctttccctctataaaaagaccccttctaggaattgagggagacagcaagcaccaagcagcgatccgaagctcaatcaattcactcaaacctcttccccaaatcttcgattagatcttcgttgacaagaagactagaaccgaacctgacatgtccaacctgctcacggttcaccagaaccttccggctcttccagtggacgcgacgtccgatgaagtcaggaagaacctcatggacatgttccgcgacaggcaagcgttcagcgagcacacctggaagatgctgctctccgtctgccgctcctgggctgcatggtgcaagctgaacaacaggaagtggttccccgctgagcccgaggacgtgagggattaccttctgtacctgcaagcgcgaggtttgtttctgcttctacctttgatatatatataataattatcattaattagtagtaatataatatttcaaatatttttttcaaaataaaagaatgtagtatatagcaattgcttttctgtagtttataagtgtgtatattttaatttataacttttctaatatatgaccaaaacatggtgatgcctaggtctggcagtgaagaccatccagcaacaccttggacaactgaacatgcttcacaggcgctccggcctcccgcgccccagcgactcgaacgccgtgagcctcgtcatgcgccgcatcaggaaggaaaacgtcgatgccggcgaaagggcaaagcaggccctcgcgttcgagaggaccgatttcgaccaggtccgcagcctgatggagaacagcgacaggtgccaggacattaggaacctggcgttcctcggaattgcatacaacacgctcctcaggatcgcggaaattgcccgcattcgcgtgaaggacattagccgcaccgacggcggcaggatgcttatccacattggcaggaccaagacgctcgtttccaccgcaggcgtcgaaaaggccctcagcctcggagtgaccaagctcgtcgaacgctggatctccgtgtccggcgtcgcggacgacccaaacaactacctcttctgccgcgtccgcaagaacggggtggctgcccctagcgccaccagccaactcagcacgagggccttggaaggtattttcgaggccacccaccgcctgatctacggcgcgaaggatgacagcggtcaacgctacctcgcatggtccgggcactccgcccgcgttggagctgctagggacatggcccgcgccggtgtttccatccccgaaatcatgcaggcgggtggatggacgaacgtgaacattgtcatgaactacattcgcaaccttgacagcgagacgggcgcaatggttcgcctcctggaagatggtgactgaggtacccaacctagacttgtccatcttctggattggccaacttaattaatgtatgaaataaaaggatgcacacatagtgacatgctaatcactataatgtgggcatcaaagttgtgtgttatgtgtaattactagttatctgaataaaagagaaagagatcatccatatttcttatcctaaatgaatgtcacgtgtctttataattctttgatgaaccagatgcatttcattaaccaaatccatatacatataaatattaatcatatataattaatatcaattgggttagcaaaacaaatctagtctaggtgttttttgcgatccgatatcgatcacggtaggggtcgtacagggtgttgaagaagaacggggtggatgggctgaggaggttcttgatgtgctgctcaagagcattgatatccttgccagatgggtccttggcaacctaaacgatgtgcaaaggggccctggccgaagcttacactgatagtttaaactgaaggcgggaaacgacaatctgatcatgagcggagaattaagggagtcacgttatgacccccgccgatgacgcgggacaagccgttttacgtttggaactgacagaaccgcaacgattgaaggagccactcagccgcgggtttctggagtttaatgagctaagcacatacgtcagaaaccattattgcgcgttcaaaagtcgcctaaggtcactatcagctagcaaatatttcttgtcaaaaatgctccactgacgttccataaattcccctcggtatccaattagagtctcatattcactcccatggcggccaatgcgggcggcggtggagcgggaggaggcagcggcagcggcagcgtggctgcgccggcggtgtgccgccccagcggctcgcggtggacgccgacgccggagcagatcaggatgctgaaggagctctactacggctgcggcatccggtcgcccagctcggagcagatccagcgcatcaccgccatgctgcggcagcacggcaagatcgagggcaagaacgtcttctactggttccagaaccacaaggcccgcgagcgccagaagcgccgcctcaccagcctcgacgtcaacgtgcccgccgccggcgcggccgacgccaccaccagccaactcggcgtcctctcgctgtcgtcgccgccgccttcaggcgcggcgcctccctcgcccaccctcggcttctacgccgccggcaatggcggcggatcggctgtgctgctggacacgagttccgactggggcagcagcggcgctgctatggccaccgagacatgcttcctgcaggactacatgggcgtgacggacacgggcagctcgtcgcagtggccacgcttctcgtcgtcggacacgataatggcggcggccgcggcgcgggcggcgacgacgcgggcgcccgagacgctccctctcttcccgacctgcggcgacgacggcggcagcggtagcagcagctacttgccgttctggggtgccgcgtccacaactgccggcgccacttcttccgttgcgatccaacagcaacaccagctgcaggagcagtacagcttttacagcaacagcaacagcacccagctggccggcaccggcaaccaagacgtatcggcaacagcagcagcagccgccgccctggagctgagcctcagctcatggtgctccccttaccctgctgcagggagtatgtgagatcaacgcgagctgccactgctcttcactgatgtctctggaatggaaggaggaggaagtgagaacagatcattcgacaaagcagcattagtccgttgatcggtggaagaccactcgtcagtgttgagttgaatgtttgatcaataaaatacggcaatgctgtaagggttgttttttatgccattgataatacactgtactgttcagttgttgaactctatttcttagccatgccaagtgcttttcttattttgaataacattacagcaaaaagttgaaagacaaaaaaaaaaacccccgaacagagtgctttgggtcccaagcttctttagactgtgttcggcgttccccctaaatttctccccctatatctcactcacttgtcacatcagcgttctctttccccctatatctccacgctctacagcagttccacctatatcaaacctctataccccaccacaacaatattatatactttcatcttcaactaactcatgtaccttccaatttttttctactaataattatttacgtgcacagaaacttagcaaggagagagagagcgggaatttaaatgctcggcgttaggcttttagtccgctaggtggctagaccgaggttaggacgctagttcactaggggcctagtggtgttttaagacgtcacggtcaccgcggccgcatcgagcagctggcttgtggggaccagacaaaaaaggaatggtgcagaattgttaggcgcacctaccaaaagcatctttgcctttattgcaaagataaagcagattcctctagtacaagtggggaacaaaataacgtggaaaagagctgtcctgacagcccactcactaatgcgtatgacgaacgcagtgacgaccacaaaactcgagcaacgagatcatgagccaatcaaagaggagtgatgtagacctaaagcaataatggagccatgacgtaagggcttacgcccatacgaaataattaaaggctgatgtgacctgtcggtctctcagaacctttactttttatgtttggcgtgtatttttaaatttccacggcaatgacgatgtgaccgtcgacccactaaaacattgctttgtcaaaagctaaaaaagatgatgcccgacagccacttgtgtgaagcatgagaagccggtccctccactaagaaaattagtgaagcatcttccagtggtccctccactcacagctcaatcagtgagcaacaggacgaaggaaatgacgtaagccatgacgtctaatcccattcgaaacgcgtggaccgaagcttgcatgcctgcagtgcagcgtgacccggtcgtgcccctctctagagataatgagcattgcatgtctaagttataaaaaattaccacatattttttttgtcacacttgtttgaagtgcagtttatctatctttatacatatatttaaactttactctacgaataatataatctatagtactacaataatatcagtgttttagagaatcatataaatgaacagttagacatggtctaaaggacaattgagtattttgacaacaggactctacagttttatctttttagtgtgcatgtgttctcctttttttttgcaaatagcttcacctatataatacttcatccattttattagtacatccatttagggtttagggttaatggtttttatagactaatttttttagtacatctattttattctattttagcctctaaattaagaaaactaaaactctattttagtttttttatttaataatttagatataaaatagaataaaataaagtgactaaaaattaaacaaataccctttaagaaattaaaaaaactaaggaaacatttttcttgtttcgagtagataatgccagcctgttaaacgccgtcgacgagtctaacggacaccaaccagcgaaccagcagcgtcgcgtcgggccaagcgaagcagacggcacggcatctctgtcgctgcctctggacccctctcgagagttccgctccaccgttggacttgctccgctgtcggcatccagaaattgcgtggcggagcggcagacgtgagccggcacggcaggcggcctcctcctcctctcacggcaccggcagctacgggggattcctttcccaccgctccttcgctttcccttcctcgcccgccgtaataaatagacaccccctccacaccctctttccccaacctcgtgttgttcggagcgcacacacacacaaccagatctcccccaaatccacccgtcggcacctccgcttcaaggtacgccgctcgtcctcccccccccccctctctaccttctctagatcggcgttccggtccatgcatggttagggcccggtagttctacttctgttcatgtttgtgttagatccgtgtttgtgttagatccgtgctgctagcgttcgtacacggatgcgacctgtacgtcagacacgttctgattgctaacttgccagtgtttctctttggggaatcctgggatggctctagccgttccgcagacgggatcgatttcatgattttttttgtttcgttgcatagggtttggtttgcccttttcctttatttcaatatatgccgtgcacttgtttgtcgggtcatcttttcatgcttttttttgtcttggttgtgatgatgtggtctggttgggcggtcgttctagatcggagtagaattctgtttcaaactacctggtggatttattaattttggatctgtatgtgtgtgccatacatattcatagttacgaattgaagatgatggatggaaatatcgatctaggataggtatacatgttgatgcgggttttactgatgcatatacagagatgctttttgttcgcttggttgtgatgatgtggtgtggttgggcggtcgttcattcgttctagatcggagtagaatactgtttcaaactacctggtgtatttattaattttggaactgtatgtgtgtgtcatacatcttcatagttacgagtttaagatggatggaaatatcgatctaggataggtatacatgttgatgtgggttttactgatgcatatacatgatggcatatgcagcatctattcatatgctctaaccttgagtacctatctattataataaacaagtatgttttataattattttgatcttgatatacttggatgatggcatatgcagcagctatatgtggatttttttagccctgccttcatacgctatttatttgcttggtactgtttcttttgtcgatgctcaccctgttgtttggtgttacttctgcaggtcgactttaacttagcctaggatccatggccactgtgaacaactggctcgctttctccctctccccgcaggagctgccgccctcccagacgacggactccacactcatctcggccgccaccgccgaccatgtctccggcgatgtctgcttcaacatcccccaagattggagcatgaggggatcagagctttcggcgctcgtcgcggagccgaagctggaggacttcctcggcggcatctccttctccgagcagcatcacaaggccaactgcaacatgatacccagcactagcagcacagtttgctacgcgagctcaggtgctagcaccggctaccatcaccagctgtaccaccagcccaccagctcagcgctccacttcgcggactccgtaatggtggcttcctcggccggtgtccacgacggcggtgccatgctcagcgcggccgccgctaacggtgtcgctggcgctgccagtgccaacggcggcggcatcgggctgtccatgattaagaactggctgcggagccaaccggcgcccatgcagccgagggtggcggcggctgagggcgcgcaggggctctctttgtccatgaacatggcggggacgacccaaggcgctgctggcatgccacttctcgctggagagcgcgcacgggcgcccgagagtgtatcgacgtcagcacagggtggagccgtcgtcgtcacggcgccgaaggaggatagcggtggcagcggtgttgccggcgctctagtagccgtgagcacggacacgggtggcagcggcggcgcgtcggctgacaacacggcaaggaagacggtggacacgttcgggcagcgcacgtcgatttaccgtggcgtgacaaggcatagatggactgggagatatgaggcacatctttgggataacagttgcagaagggaagggcaaactcgtaagggtcgtcaagtctatttaggtggctatgataaagaggagaaagctgctagggcttatgatcttgctgctctgaagtactggggtgccacaacaacaacaaattttccagtgagtaactacgaaaaggagctcgaggacatgaagcacatgacaaggcaggagtttgtagcgtctctgagaaggaagagcagtggtttctccagaggtgcatccatttacaggggagtgactaggcatcaccaacatggaagatggcaagcacggattggacgagttgcagggaacaaggatctttacttgggcaccttcagcacccaggaggaggcagcggaggcgtacgacatcgcggcgatcaagttccgcggcctcaacgccgtcaccaacttcgacatgagccgctacgacgtgaagagcatcctggacagcagcgccctccccatcggcagcgccgccaagcgcctcaaggaggccgaggccgcagcgtccgcgcagcaccaccacgccggcgtggtgagctacgacgtcggccgcatcgcctcgcagctcggcgacggcggagccctggcggcggcgtacggcgcgcactaccacggcgccgcctggccgaccatcgcgttccagccgggcgccgccagcacaggcctgtaccacccgtacgcgcagcagccaatgcgcggcggcgggtggtgcaagcaggagcaggaccacgcggtgatcgcggccgcgcacagcctgcaggacctccaccacctgaacctgggcgcggccggcgcgcacgactttttctcggcagggcagcaggccgccgccgctgcgatgcacggcctgggtagcatcgacagtgcgtcgctcgagcacagcaccggctccaactccgtcgtctacaacggcggggtcggcgacagcaacggcgccagcgccgtcggcggcagtggcggtggctacatgatgccgatgagcgctgccggagcaaccactacatcggcaatggtgagccacgagcaggtgcatgcacgggcctacgacgaagccaagcaggctgctcagatggggtacgagagctacctggtgaacgcggagaacaatggtggcggaaggatgtctgcatgggggactgtcgtgtctgcagccgcggcggcagcagcaagcagcaacgacaacatggccgccgacgtcgggcatggcggcgcgcagctcttcagtgtctggaacgacacttaagcgtacctagtggtacctgacatcttatagtctgcaacctctcgtgtctgaattcctatctttatcaagtgttattgcttccacgactataggacagctttcgtcgaaagcttttgctcatgtgatctcgaaggattcatctagtctgatttttcgtgacttgtatcggttttattggattcatccaacatatatcaataaaaaatgagttgtgtttcctttcttcctagttcagttaaaattatttccctcctgcgcttgtgctgtaattgtctgtgtacctgttgtttgtgactgtgttagttcccttggatatgatttcgtatttgatatgtacatggagatagcttagcttcattattggagtatgaagttagtatgacatagtcactctcctggaaaattgacactgcaaaccatatttttattctgaaccacaaatcctagtcagtccgctggcatatgccgtccgtttgctgaatccagaacgtgggtttggagatgtacggctgagatgcctctatgcgaaggggatttcgtggtgaaacgagatgggagtagagcaacgcccgtggaagatgcttcaaacttccacacttttgagcaacgatcggcagtagtaaggtagacgatttcaagatcaaagcatatgaagataaacaacatcaacaacaaaatttgttggggttctatagagagaaacagagctacatacatacactgttttgtatctaccatctgagatgatgaaaagatgaaaaactaaagaatgccccggcgccaacgccaggacacgccgcgcgcgcgtcacccgagccatctcttgacccagccggcgctgtatatttacacacgttgcagcatcgatcaccacctgttcgatcgcgtcgccgtcaccggcgcgccgcgacttattgaactagtctagggcgcggctaacaacctagcttagattgccttgtctaaacccttaggctaacgcgccactctagacgtgcgcacgataacttcgtatagcatacattatacgaagttataacagcggaccgggttaccgaattcctgcccttaaggccaattgttcaagattcattcaacaattgaaacatctcccatgattaaatcagtataaggttgctatggtcttgcttgacaaagtttttttttgagggaatttcaactaaatttttgagtgaaactatcaaatactgattttaaaaaatttttataaaaggaagcgcagagataaaaggccatctatgctacaaaagtacccaaaaatgtaatcctaaagtatgaattgcattttttttttgtttggacgaaaggaaaggagtattaccacaagaatgatatcatcttcatatttagatcttttttgggtaaagcttgagattctctaaatatagagaaatcagaagaaaaaaaaaccgtgttttggtggttttgatttctagcctccacaataactttgacggcgtcgacaagtctaacggacaccaagcagcgaaccaccagcgccgagccaagcgaagcagacggccgagacgttgacaccttcggcgcggcatctctcgagagttccgctccggcgctccacctccaccgctggcggtttcttattccgttccgttccgcctcctgctctgctcctctccacaccacacggcacgaaaccgttacggcaccggcagcacccagcacgggagaggggattcctttcccaccgttccttccctttccgccccgccgctataaatagccagccccatccccagcttttttccccaatctcatctcctctctcctgttgttcggagcacacgcacaatccgatcgatccccaaatccccttcgtctctcctcgcgagcctcgtggatcccagcttcaaggtacggcgatcgatcatcccccctccttctctctaccttcttttctctagactacatcggatggcgatccatggttagggcctgctagtttcccttcctgttttgtcgatggctgcgaggcacaatagatctgatggcgttatgacggctaacttgtcatgttgttgcgatttatagtccctttaggagatcagtttaatttctcggatggttcgagatcggtggtccatggttagtaccctaagatccgcgctgttagggttcgtagatggaggcgacctgttctgattgttaacttgtcagtacctgggaaatcctgggatggttctagctcgtccgcagatgagatcgatttcatgatcctctgtatcttgtttcgttgcctaggttccgtctaatctatccgtggtatgatgtagatgttttgatcgtgctaactacgtcttgtaaagttaattgtcaggtcataatttttagcatgcctttttttttgtttggttttgtctaattgggctgtcgttctagatcagagtagaagactgttccaaactacctgctggatttattgaacttggatctgtatgtgtgtcacatatcttcataaattcatgattaagatggattgaaatatcttttatctttttggtatggatagttctatatgttggtgtggctttgttagatgtatacatgcttagatacatgaagcaacgtgctgctactgtttagtaattgctgttcatttgtctaataaacagataaggatatgtatttatgttgctgttggttttgctggtactttgttggatacaaatgcttcaatacagaaaacagcatgctgctacgatttaccatttatctaatcttatcatatgtctaatctaataaacaaacatgcttttaaattatcttcatatgcttggatgatggcatacacagcggctatgtgtggttttttaaatacccagcatcatgggcatgcatgacactgctttaatatgctttttatttgcttgagactgtttcttttgtttatactgaccctttagttcggtgactcttctgcaggtcgactttaacttagcctaggatccatggcccagtccaagcacggcctgaccaaggagatgaccatgaagtaccgcatggagggctgcgtggacggccacaagttcgtgatcaccggcgagggcatcggctaccccttcaagggcaagcaggccatcaacctgtgcgtggtggagggcggccccttgcccttcgccgaggacatcttgtccgccgccttcatgtacggcaaccgcgtgttcaccgagtacccccaggacatcgtcgactacttcaagaactcctgccccgccggctacacctgggaccgctccttcctgttcgaggacggcgccgtgtgcatctgcaacgccgacatcaccgtgagcgtggaggagaactgcatgtaccacgagtccaagttctacggcgtgaacttccccgccgacggccccgtgatgaagaagatgaccgacaactgggagccctcctgcgagaagatcatccccgtgcccaagcagggcatcttgaagggcgacgtgagcatgtacctgctgctgaaggacggtggccgcttgcgctgccagttcgacaccgtgtacaaggccaagtccgtgccccgcaagatgcccgactggcacttcatccagcacaagctgacccgcgaggaccgcagcgacgccaagaaccagaagtggcacctgaccgagcacgccatcgcctccggctccgccttgccctccggactcagatctcgatagggtaccaatggccagttaacagatccagctgctgctgttctagggttcacaagtctgcctatttgtcttccccaatggagctatggttgtctggtctggtccttggtcgtgtcccgtttcattgtgtactatttacctgtaatgtgtatccttaagtctggtttgatggtgtctgaaacgttttgctgtggtagagcagcatggaagaactataatgaataagtgatccctaatcattgtgtccaaattttgcttctgctatacccttttgtgctgtttcttatgttttgcttaaaaatttgatctgacaaacaaatttgtctaaattatgctcttgttctgactgtgtactgtacacatttgtattgctaccggtttggcacatagttttctctttgattgcagatcaaacccttctgattgcagattgcttggctatggctgatgtgctcactgttcttctttagcttgtatattgctgatggtggcttggctacggctgaaaaagttgctgctgcgccgacttggcaactgttgctccagtaatgctttgtcctctcttcctagccgccgacttggcacttggcagctgttgctcctgtaatgcgttgttatctcttatctcttgagatgtactatgattttgaggctgtttgacttgtgccagattgccagtgctgatgctatattatctcaggtttttatgctagtatatgttttactgtgtgctgcctgtgtcgagttacgtaatctattgaaccgctatgcgtgttgatgccctgttgttgcttgccagattgatgcccctgttgcttgcagcttgcaagctgtagtgaaatcctaaaattcgaaaccaaatctattctgaacttttgaagatctgtgatgtccggaagaaaagattcaaacagataaacgggactctccagaatctataaaataaatgatcgacaaacgctttgctttggtaggcttcctagttagttagcggaccgaagcttcggtccgggcctagaaggccagcttcggccgcccctcggtaccctgggatctgcccttactttaacgcctctaaccaacacccctttatctttataaggaacaataaacagaatttgccccactgttctaaatcacctaataatatccccagctaaaaacaataaaggtttcctagaattaagacaagcatgactgttcctccaggagggtttggaacattgttgcagtcttgcagatacgggcgaagggtgagaaacagagcggagggctggaggtgacctcggtagtcgacgccggagttgagcttgacaacgacggggcggcccctgatggacttgaggaagtccgatggcgtcttcaccgtcccgccggcgcccgaggcgggcctgtcgctgccgccgccgccgctgctcatcttgcgcgctgtgcccccggcggtgtccctgtgttgcggatcgcgggtgggccaggtggatgcgagggcgacccgtttggactccggccggagccgccggatccctggtcggtgtcagtgccgtttactctgggccccacgtgtcagtaccgtctgtagatgacaacaacccgtcgtccacagtcatgtccaaaatatcctttcttcttttttttcgattcggatatctatcttccttttttttttccaaaaatcttcttgacgcaccagcgcgcacgtttgtggtaaacgccgacacgtcggtcccacgtcgatagaccccacccaccagtgagtagcgtgtacgtattcgggggtgacggacgtgtcgccgtcgtcttgctagtcccattcccatctgagccacacatctctgaacaaaaaaaaggagggaggcctccacgcacatccccctccgtgccacccgccccaaaccctcgcgccgcctccgagacagccgccgcaaccatggccaccgccgccgccgcgtctaccgcgctcactggcgccactaccgctgcgcccaaggcgaggcgccgggcgcacctcctggccacccgccgcgccctcgccgcgcccatcaggtgctcagcggcgtcacccgccatgccgatggctcccccggccaccccgctccggccgtggggccccaccgagccccgcaagggtgctgacatcctcgtcgagtccctcgagcgctgcggcgtccgcgacgtcttcgcctaccccggcggcgcgtccatggagatccaccaggcactcacccgctcccccgtcatcgccaaccacctcttccgccacgagcaaggggaggcctttgccgcctccggctacgcgcgctcctcgggccgcgtcggcgtctgcatcgccacctccggccccggcgccaccaacctagtctccgcgctcgccgacgcgctgctcgattccgtccccatggtcgccatcacgggacaggtggcgcgacgcatgattggcaccgacgccttccaggagacgcccatcgtcgaggtcacccgctccatcaccaagcacaactacctggtcctcgacgtcgacgacatcccccgcgtcgtgcaggaggctttcttcctcgcctcctctggtcgaccagggccggtgcttgtcgacatccccaaggacatccagcagcagatggcggtgcctgtctgggacaagcccatgagtctgcctgggtacattgcgcgccttcccaagccccctgcgactgagttgcttgagcaggtgctgcgtcttgttggtgaatcgcggcgccctgttctttatgtgggcggtggctgcgcagcatctggtgaggagttgcgacgctttgtggagctgactggaatcccggtcacaactactcttatgggcctcggcaacttccccagcgacgacccactgtctctgcgcatgctaggtatgcatgggacggtgtatgcaaattatgcagtggataaggccgatctgttgcttgcacttggtgtgcggtttgatgatcgcgtgacagggaagattgaggcttttgcaagcagggctaagattgtgcacgttgatattgatccggctgagattggcaagaacaagcagccacatgtgtccatctgtgcagatgttaagcttgctttgcagggcatgaatgctcttcttgaaggaagcacatcaaagaagagctttgactttggctcatggaacgatgagttggatcagcagaagagggaattcccccttgggtataaaacatctaatgaggagatccagccacaatatgctattcaggttcttgatgagctgacgaaaggcgaggccatcatcggcacaggtgttgggcagcaccagatgtgggcggcacagtactacacttacaagcggccaaggcagtggttgtcttcagctggtcttggggctatgggatttggtttgccggctgctgctggtgcttctgtggcaaacccaggtgtcactgttgttgacatcgatggagatggtagctttctcatgaacgttcaggagctagctatgatccgaattgagaacctcccagtgaaggtctttgtgctaaacaaccagcacctggggatggtggtgcagttggaggacaggttctataaggccaacagagcgcacacatacttgggaaacccagagaatgaaagtgagatatatccagatttcgtgacgatcgccaaagggttcaacattccagccgtccgtgtgacaaagaagaacgaagtccgcgcagcgataaagaagatgctcgagactccagggccgtacctcttggatataatcgtcccacaccaggagcatgtgttgcctatgatccctagtggtggggctttcaaggatatgatcctggatggtgatggcaggactgtgtactgacttcgaataggtacccggggatcctctagtgccgtgggtcgtttaagctgccgctgtacctgtgtcgtctggtgccttctggtgtacctgggaggttgtcgtctatcaagtatctgtggttggtgtcatgagtcagtgagtcccaatactgttcgtgtcctgtgtgcattatacccaaaactgttatgggcaaatcatgaataagcttgatgttcgaacttaaaagtctctgctcaatatggtattatggttgtttttgttcgtctcctaatatttgcctgggatcaaattttattggctggtgttcatttgacctccatgttcttgctaggctccattttttactctacagccataatatgtttgattgtttggtttgttctttgttgtacacctggttctgtcgagcttagttttcgacactggcttacagcttaacatgttgctattttattgggttctgattgctattttattgggttctgattgctagtttttgctgaatccaaaaaccatgttatttatttaagcgatccaggttattattatgatggtggctaagtttttttttttccaagggtaaattttctggattctccagtgtttctgtggccgaattcaatcactagagtcgacctgcaaagcttcggtccgggcctagaaggcccgcgccacttacgcttgattccgatgacttcgtaggttcctagctcaagccgctcgtgtccaagcgtcacttacgattagctaatgattacggcatctaggaccgactagttcttatgtgcttctagtctccaaatgtggttgatagttattttgctctaagatcaacagtaatgaagtataaatcatcgttgtggtgtgctactcggttaattgagcattaacacacacaaacatgacgaggatggtataatctccaaaaatgtgtactttgttaggtgggaccctatagccttgattaatgtgctatgttaggcatgcctggaaacgtgtgacgcatatgttttgtgaacctgttgatattatatgtgcttttatattaccatattttattaaaatactaatatttattactagtaagatataacattctatctagcttaaaaactaaccataaatattccataataactagatttaccaaactaatatactaaatatacataataaatacaaaattaacaagacaataatcaatatttatgagcttaatatatttagacattatggttggtcgacgataatcatgctaacttttcgtaattgcttgattgaaatatgcttagaataatgcctctttgttctacatggcaaatagggaccattatggtgtaacaccctgggaaccacaaacaccccgaaatgctactaaactacacaactaaccttcatatataaaatttcgacagcatctcctttgaaaatttgcatagacgtggaagcaacagagtataaacagatctgcgtttaaacgtgcaagcgctactagacaattcagtacattaaaaacgtccgcaatgtgttattaagttgtctaagcgtcaatttgtttacaccacaatatatcctgcca

SEQ ID NO: 147 - DNA, 20869 bp, unidentified
  source 1..20869: mol_type = other DNA; note = Artificial
gtttacccgccaatatatcctgtcaaacactgcggccgcacttgaccgcggatggagccggagctgtggtgaggccatcgacgggaggtgggggagaacacagtctcagtgttctttgtgagtccgcaaggtttttagcttttctgtattaattaaggttgctgttggctgtagaatacggtcgtggaagagctgtatcggtagctactacgtaagctattatatactggaagtctggagctcgtcgatctccggtcgtcttcctccatttctcctcgtcttgctttgactgctgctaccatttgcttctgttttctgatgaagcatgccatgtcggccaccagtgtttgtgtggtttttgcagggaatggctttcaagtgctgtgattgaatggccctcgtcgtcctcggctgagctcacatggacgcgtcatgtgagtgagatatatgatcatatgatgagtggggttcgggtgagtgcgtacttgaagtaggatcccgctttcactcattcattcattggcctttaaaccgggaaattttcgcgaggagatggagggaagcaagcagggtgacgagtgcagagtgccgcgagcgctttgtcaaaaggcaccgccgtaggcaaaaaaatcaatggccctgactgactcgatggtagtactactgtagagactagagagggttgctccccatatcttcgtgtgacttttactccagcattgcatttccgtcattgagacgttaattaatagcagctttcgggacagatgactgtggccatgtttcgtcacggccgcttcgtgccagctgggggtactatagtactgtgattttgttagtaaaaactttcattaggccaccattgacgaccgggccttcgcttttgctgcgctaattaaccatttcccggcgaccgaagggaacatgaacatgccccgacacatgagggcatgaggactagtgttctccctgtcgttcgttgacttgactagtgatagtttaaacgctcttcaactggaagagcggttactaccggttcactagctagctgctaatcgagctagttaccctatgaggtgacatgaagcgctcacggttactatgacggttagcttcacgactgttggtggcagtagcgtacgacttagctatagttccggacttacctagctaataacttcgtatagcatacattatacgaagttatggttaccgagctccaccttgctagttggatattacctcttctcttcaaagtatccttgaacgctcaccggttatcaaatctctacactatagctctgtagtcttgctagatagttagttctttagctctctctagaggttcacaaactcaatacaacacacagtggagtagggtattacgctccggcggcccgaaccactctaaatccttgtgtcctcgtgtgctcttccaccattaatgactgtaattgcagggacacgaagagttgtagcgcttttgccaacaagatccgctatatgctagtagagtggaacctgcacagcaacaagcatccaataatctgagaataagaattatgtgtggtgatggttctcatctctgcaactcgccattttcgcgagagaaccaaatccaagttggtgaagatcatgatttgggctcatgggctggcatagtagctattacctttgcaattgtggttcgaatctatccgatattctccttttcagggagagctaatgcttatgcttattgggtattttggtttgacactgcttcacgcccaaaaaaaggcaactatgtctgagttggatatggcccaaaaaaaggcagctatgtctgagttggatatggaagtcttctttcgtttagggtgaagtaagaccaagctcatgagcttattatcttaggtcggaacaaattagttgataggcatggcacatttatcaaattataatgattttaacagaaaagcaacacctctttttcagcagcaccagctttgcaagctgcaattgacactccaagcatagtatttgctccaaactcagcctgcatttcgcacaatatcatatctatttccatttggataaaatatattttccagaaatatgggaacagaatcaagatacagaaaaaagttgtggtagtagtggtaagtggaaacacaagtacagtgaaaagatagcattatttctgaacagtcaaattaaccgaaataagtagtatcacatactgcccctaaattgactacacccaatgtaaagaattgcttgagcatattgagccatcagttgtttgtttgtgtaacggatttgacaatgcagagttcaggagcaaaaaaccgcaaaggagagaaagagggaaaggatctcctagtatcccaccttgtggcgcgccctgtcaagtgcatgatggcctggtcgatctgcgtctgctgctgcggttccatcccaacgagtgcctccgacaccttgtcgttgatcacccgcaccgcgtaggcgacccccctggcgaggaacttccgcctctcggaggccccggccgcgtcggcggcggcgccctcgagcgcgcccacgctagccgtagatgctcggtgcacggccttgttggtgtgcaactcgacctcaacggccggtgcgctacgcccgtcaaggatctggcgcgcccgcaccctcgtgatcacggtgggcgcctcccgcctcatgtggccgacgatgaaaagcgccgggttaggggccttggcgcgcaccgccgtattcagggcctcctcgctcttgcgcgagagcaggtgcttccccaggtactcctgcactgacaaggctgccacagcggtggaatttgtcctcacgacttcgccacgtcgtcctcacctccctggcttcccacgactccgccgtatcgaggtgctcggtgggtcgtcttaatccgaagtccgaactaggaagacgagacagagaggtctgaggaatgggcctcgtttgatgttgagctgaattatttttccagcataagcccaggtcttggtccatgaacaaaattactagaaacccagcccagtactacgatctaaaagagggactgccactggatagctctctctagcattctccacgctccaatacagcggcgtcgtgtctatccgggtctatccgcgaacacgtgagaactctccagaaactgctttctcctccacttcatctctctcgctttccctctataaaaagaccccttctaggaattgagggagacagcaagcaccaagcagcgatccgaagctcaatcaattcactcaaacctcttccccaaatcttcgattagatcttcgttgacaagaagactagaaccgaacctgacatgtccaacctgctcacggttcaccagaaccttccggctcttccagtggacgcgacgtccgatgaagtcaggaagaacctcatggacatgttccgcgacaggcaagcgttcagcgagcacacctggaagatgctgctctccgtctgccgctcctgggctgcatggtgcaagctgaacaacaggaagtggttccccgctgagcccgaggacgtgagggattaccttctgtacctgcaagcgcgaggtttgtttctgcttctacctttgatatatatataataattatcattaattagtagtaatataatatttcaaatatttttttcaaaataaaagaatgtagtatatagcaattgcttttctgtagtttataagtgtgtatattttaatttataacttttctaatatatgaccaaaacatggtgatgcctaggtctggcagtgaagaccatccagcaacaccttggacaactgaacatgcttcacaggcgctccggcctcccgcgccccagcgactcgaacgccgtgagcctcgtcatgcgccgcatcaggaaggaaaacgtcgatgccggcgaaagggcaaagcaggccctcgcgttcgagaggaccgatttcgaccaggtccgcagcctgatggagaacagcgacaggtgccaggacattaggaacctggcgttcctcggaattgcatacaacacgctcctcaggatcgcggaaattgcccgcattcgcgtgaaggacattagccgcaccgacggcggcaggatgcttatccacattggcaggaccaagacgctcgtttccaccgcaggcgtcgaaaaggccctcagcctcggagtgaccaagctcgtcgaacgctggatctccgtgtccggcgtcgcggacgacccaaacaactacctcttctgccgcgtccgcaagaacggggtggctgcccctagcgccaccagccaactcagcacgagggccttggaaggtattttcgaggccacccaccgcctgatctacggcgcgaaggatgacagcggtcaacgctacctcgcatggtccgggcactccgcccgcgttggagctgctagggacatggcccgcgccggtgtttccatccccgaaatcatgcaggcgggtggatggacgaacgtgaacattgtcatgaactacattcgcaaccttgacagcgagacgggcgcaatggttcgcctcctggaagatggtgactgaggtacccaacctagacttgtccatcttctggattggccaacttaattaatgtatgaaataaaaggatgcacacatagtgacatgctaatcactataatgtgggcatcaaagttgtgtgttatgtgtaattactagttatctgaataaaagagaaagagatcatccatatttcttatcctaaatgaatgtcacgtgtctttataattctttgatgaaccagatgcatttcattaaccaaatccatatacatataaatattaatcatatataattaatatcaattgggttagcaaaacaaatctagtctaggtgtgttttgcgatccgatatcgatttcacgttttctagaagtggtgataatttgaactttgtccaaagtagtactgacatgttccgtgcgaaagattattctcaatgggaagaggaaaacactgtttccaaagctatcatgtcaaaaaaaaaacactaaatctcttgtattgggccctggccgaagcttacactgatagtttaaactgaaggcgggaaacgacaatctgatcatgagcggagaattaagggagtcacgttatgacccccgccgatgacgcgggacaagccgttttacgtttggaactgacagaaccgcaacgattgaaggagccactcagccgcgggtttctggagtttaatgagctaagcacatacgtcagaaaccattattgcgcgttcaaaagtcgcctaaggtcactatcagctagcaaatatttcttgtcaaaaatgctccactgacgttccataaattcccctcggtatccaattagagtctcatattcactcccatggcggccaatgcgggcggcggtggagcgggaggaggcagcggcagcggcagcgtggctgcgccggcggtgtgccgccccagcggctcgcggtggacgccgacgccggagcagatcaggatgctgaaggagctctactacggctgcggcatccggtcgcccagctcggagcagatccagcgcatcaccgccatgctgcggcagcacggcaagatcgagggcaagaacgtcttctactggttccagaaccacaaggcccgcgagcgccagaagcgccgcctcaccagcctcgacgtcaacgtgcccgccgccggcgcggccgacgccaccaccagccaactcggcgtcctctcgctgtcgtcgccgccgccttcaggcgcggcgcctccctcgcccaccctcggcttctacgccgccggcaatggcggcggatcggctgtgctgctggacacgagttccgactggggcagcagcggcgctgctatggccaccgagacatgcttcctgcaggactacatgggcgtgacggacacgggcagctcgtcgcagtggccacgcttctcgtcgtcggacacgataatggcggcggccgcggcgcgggcggcgacgacgcgggcgcccgagacgctccctctcttcccgacctgcggcgacgacggcggcagcggtagcagcagctacttgccgttctggggtgccgcgtccacaactgccggcgccacttcttccgttgcgatccaacagcaacaccagctgcaggagcagtacagcttttacagcaacagcaacagcacccagctggccggcaccggcaaccaagacgtatcggcaacagcagcagcagccgccgccctggagctgagcctcagctcatggtgctccccttaccctgctgcagggagtatgtgagatcaacgcgagctgccactgctcttcactgatgtctctggaatggaaggaggaggaagtgagaacagatcattcgacaaagcagcattagtccgttgatcggtggaagaccactcgtcagtgttgagttgaatgtttgatcaataaaatacggcaatgctgtaagggttgttttttatgccattgataatacactgtactgttcagttgttgaactctatttcttagccatgccaagtgcttttcttattttgaataacattacagcaaaaagttgaaagacaaaaaaaaaaacccccgaacagagtgctttgggtcccaagcttctttagactgtgttcggcgttccccctaaatttctccccctatatctcactcacttgtcacatcagcgttctctttccccctatatctccacgctctacagcagttccacctatatcaaacctctataccccaccacaacaatattatatactttcatcttcaactaactcatgtaccttccaatttttttctactaataattatttacgtgcacagaaacttagcaaggagagagagagcgggaatttaaatgctcggcgttaggcttttagtccgctaggtggctagaccgaggttaggacgctagttcactaggggcctagtggtgttttaagacgtcacggtcaccgcggccgcatcgagcagctggcttgtggggaccagacaaaaaaggaatggtgcagaattgttaggcgcacctaccaaaagcatctttgcctttattgcaaagataaagcagattcctctagtacaagtggggaacaaaataacgtggaaaagagctgtcctgacagcccactcactaatgcgtatgacgaacgcagtgacgaccacaaaactcgagcaacgagatcatgagccaatcaaagaggagtgatgtagacctaaagcaataatggagccatgacgtaagggcttacgcccatacgaaataattaaaggctgatgtgacctgtcggtctctcagaacctttactttttatgtttggcgtgtatttttaaatttccacggcaatgacgatgtgaccgtcgacccactaaaacattgctttgtcaaaagctaaaaaagatgatgcccgacagccacttgtgtgaagcatgagaagccggtccctccactaagaaaattagtgaagcatcttccagtggtccctccactcacagctcaatcagtgagcaacaggacgaaggaaatgacgtaagccatgacgtctaatcccattcgaaacgcgtggaccgaagcttgcatgcctgcagtgcagcgtgacccggtcgtgcccctctctagagataatgagcattgcatgtctaagttataaaaaattaccacatattttttttgtcacacttgtttgaagtgcagtttatctatctttatacatatatttaaactttactctacgaataatataatctatagtactacaataatatcagtgttttagagaatcatataaatgaacagttagacatggtctaaaggacaattgagtattttgacaacaggactctacagttttatctttttagtgtgcatgtgttctcctttttttttgcaaatagcttcacctatataatacttcatccattttattagtacatccatttagggtttagggttaatggtttttatagactaatttttttagtacatctattttattctattttagcctctaaattaagaaaactaaaactctattttagtttttttatttaataatttagatataaaatagaataaaataaagtgactaaaaattaaacaaataccctttaagaaattaaaaaaactaaggaaacatttttcttgtttcgagtagataatgccagcctgttaaacgccgtcgacgagtctaacggacaccaaccagcgaaccagcagcgtcgcgtcgggccaagcgaagcagacggcacggcatctctgtcgctgcctctggacccctctcgagagttccgctccaccgttggacttgctccgctgtcggcatccagaaattgcgtggcggagcggcagacgtgagccggcacggcaggcggcctcctcctcctctcacggcaccggcagctacgggggattcctttcccaccgctccttcgctttcccttcctcgcccgccgtaataaatagacaccccctccacaccctctttccccaacctcgtgttgttcggagcgcacacacacacaaccagatctcccccaaatccacccgtcggcacctccgcttcaaggtacgccgctcgtcctcccccccccccctctctaccttctctagatcggcgttccggtccatgcatggttagggcccggtagttctacttctgttcatgtttgtgttagatccgtgtttgtgttagatccgtgctgctagcgttcgtacacggatgcgacctgtacgtcagacacgttctgattgctaacttgccagtgtttctctttggggaatcctgggatggctctagccgttccgcagacgggatcgatttcatgattttttttgtttcgttgcatagggtttggtttgcccttttcctttatttcaatatatgccgtgcacttgtttgtcgggtcatcttttcatgcttttttttgtcttggttgtgatgatgtggtctggttgggcggtcgttctagatcggagtagaattctgtttcaaactacctggtggatttattaattttggatctgtatgtgtgtgccatacatattcatagttacgaattgaagatgatggatggaaatatcgatctaggataggtatacatgttgatgcgggttttactgatgcatatacagagatgctttttgttcgcttggttgtgatgatgtggtgtggttgggcggtcgttcattcgttctagatcggagtagaatactgtttcaaactacctggtgtatttattaattttggaactgtatgtgtgtgtcatacatcttcatagttacgagtttaagatggatggaaatatcgatctaggataggtatacatgttgatgtgggttttactgatgcatatacatgatggcatatgcagcatctattcatatgctctaaccttgagtacctatctattataataaacaagtatgttttataattattttgatcttgatatacttggatgatggcatatgcagcagctatatgtggatttttttagccctgccttcatacgctatttatttgcttggtactgtttcttttgtcgatgctcaccctgttgtttggtgttacttctgcaggtcgactttaacttagcctaggatccatggccactgtgaacaactggctcgctttctccctctccccgcaggagctgccgccctcccagacgacggactccacactcatctcggccgccaccgccgaccatgtctccggcgatgtctgcttcaacatcccccaagattggagcatgaggggatcagagctttcggcgctcgtcgcggagccgaagctggaggacttcctcggcggcatctccttctccgagcagcatcacaaggccaactgcaacatgatacccagcactagcagcacagtttgctacgcgagctcaggtgctagcaccggctaccatcaccagctgtaccaccagcccaccagctcagcgctccacttcgcggactccgtaatggtggcttcctcggccggtgtccacgacggcggtgccatgctcagcgcggccgccgctaacggtgtcgctggcgctgccagtgccaacggcggcggcatcgggctgtccatgattaagaactggctgcggagccaaccggcgcccatgcagccgagggtggcggcggctgagggcgcgcaggggctctctttgtccatgaacatggcggggacgacccaaggcgctgctggcatgccacttctcgctggagagcgcgcacgggcgcccgagagtgtatcgacgtcagcacagggtggagccgtcgtcgtcacggcgccgaaggaggatagcggtggcagcggtgttgccggcgctctagtagccgtgagcacggacacgggtggcagcggcggcgcgtcggctgacaacacggcaaggaagacggtggacacgttcgggcagcgcacgtcgatttaccgtggcgtgacaaggcatagatggactgggagatatgaggcacatctttgggataacagttgcagaagggaagggcaaactcgtaagggtcgtcaagtctatttaggtggctatgataaagaggagaaagctgctagggcttatgatcttgctgctctgaagtactggggtgccacaacaacaacaaattttccagtgagtaactacgaaaaggagctcgaggacatgaagcacatgacaaggcaggagtttgtagcgtctctgagaaggaagagcagtggtttctccagaggtgcatccatttacaggggagtgactaggcatcaccaacatggaagatggcaagcacggattggacgagttgcagggaacaaggatctttacttgggcaccttcagcacccaggaggaggcagcggaggcgtacgacatcgcggcgatcaagttccgcggcctcaacgccgtcaccaacttcgacatgagccgctacgacgtgaagagcatcctggacagcagcgccctccccatcggcagcgccgccaagcgcctcaaggaggccgaggccgcagcgtccgcgcagcaccaccacgccggcgtggtgagctacgacgtcggccgcatcgcctcgcagctcggcgacggcggagccctggcggcggcgtacggcgcgcactaccacggcgccgcctggccgaccatcgcgttccagccgggcgccgccagcacaggcctgtaccacccgtacgcgcagcagccaatgcgcggcggcgggtggtgcaagcaggagcaggaccacgcggtgatcgcggccgcgcacagcctgcaggacctccaccacctgaacctgggcgcggccggcgcgcacgactttttctcggcagggcagcaggccgccgccgctgcgatgcacggcctgggtagcatcgacagtgcgtcgctcgagcacagcaccggctccaactccgtcgtctacaacggcggggtcggcgacagcaacggcgccagcgccgtcggcggcagtggcggtggctacatgatgccgatgagcgctgccggagcaaccactacatcggcaatggtgagccacgagcaggtgcatgcacgggcctacgacgaagccaagcaggctgctcagatggggtacgagagctacctggtgaacgcggagaacaatggtggcggaaggatgtctgcatgggggactgtcgtgtctgcagccgcggcggcagcagcaagcagcaacgacaacatggccgccgacgtcgggcatggcggcgcgcagctcttcagtgtctggaacgacacttaagcgtacctagtggtacctgacatcttatagtctgcaacctctcgtgtctgaattcctatctttatcaagtgttattgcttccacgactataggacagctttcgtcgaaagcttttgctcatgtgatctcgaaggattcatctagtctgatttttcgtgacttgtatcggttttattggattcatccaacatatatcaataaaaaatgagttgtgtttcctttcttcctagttcagttaaaattatttccctcctgcgcttgtgctgtaattgtctgtgtacctgttgtttgtgactgtgttagttcccttggatatgatttcgtatttgatatgtacatggagatagcttagcttcattattggagtatgaagttagtatgacatagtcactctcctggaaaattgacactgcaaaccatatttttattctgaaccacaaatcctagtcagtccgctggcatatgccgtccgtttgctgaatccagaacgtgggtttggagatgtacggctgagatgcctctatgcgaaggggatttcgtggtgaaacgagatgggagtagagcaacgcccgtggaagatgcttcaaacttccacacttttgagcaacgatcggcagtagtaaggtagacgatttcaagatcaaagcatatgaagataaacaacatcaacaacaaaatttgttggggttctatagagagaaacagagctacatacatacactgttttgtatctaccatctgagatgatgaaaagatgaaaaactaaagaatgccccggcgccaacgccaggacacgccgcgcgcgcgtcacccgagccatctcttgacccagccggcgctgtatatttacacacgttgcagcatcgatcaccacctgttcgatcgcgtcgccgtcaccggcgcgccgcgacttattgaactagtctagggcgcggctaacaacctagcttagattgccttgtctaaacccttaggctaacgcgccactctagacgtgcgcacgataacttcgtatagcatacattatacgaagttataacagcggaccgggttaccgaattcctgcccttaaggccaattgttcaagattcattcaacaattgaaacatctcccatgattaaatcagtataaggttgctatggtcttgcttgacaaagtttttttttgagggaatttcaactaaatttttgagtgaaactatcaaatactgattttaaaaaatttttataaaaggaagcgcagagataaaaggccatctatgctacaaaagtacccaaaaatgtaatcctaaagtatgaattgcattttttttttgtttggacgaaaggaaaggagtattaccacaagaatgatatcatcttcatatttagatcttttttgggtaaagcttgagattctctaaatatagagaaatcagaagaaaaaaaaaccgtgttttggtggttttgatttctagcctccacaataactttgacggcgtcgacaagtctaacggacaccaagcagcgaaccaccagcgccgagccaagcgaagcagacggccgagacgttgacaccttcggcgcggcatctctcgagagttccgctccggcgctccacctccaccgctggcggtttcttattccgttccgttccgcctcctgctctgctcctctccacaccacacggcacgaaaccgttacggcaccggcagcacccagcacgggagaggggattcctttcccaccgttccttccctttccgccccgccgctataaatagccagccccatccccagcttttttccccaatctcatctcctctctcctgttgttcggagcacacgcacaatccgatcgatccccaaatccccttcgtctctcctcgcgagcctcgtggatcccagcttcaaggtacggcgatcgatcatcccccctccttctctctaccttcttttctctagactacatcggatggcgatccatggttagggcctgctagtttcccttcctgttttgtcgatggctgcgaggcacaatagatctgatggcgttatgacggctaacttgtcatgttgttgcgatttatagtccctttaggagatcagtttaatttctcggatggttcgagatcggtggtccatggttagtaccctaagatccgcgctgttagggttcgtagatggaggcgacctgttctgattgttaacttgtcagtacctgggaaatcctgggatggttctagctcgtccgcagatgagatcgatttcatgatcctctgtatcttgtttcgttgcctaggttccgtctaatctatccgtggtatgatgtagatgttttgatcgtgctaactacgtcttgtaaagttaattgtcaggtcataatttttagcatgcctttttttttgtttggttttgtctaattgggctgtcgttctagatcagagtagaagactgttccaaactacctgctggatttattgaacttggatctgtatgtgtgtcacatatcttcataaattcatgattaagatggattgaaatatcttttatctttttggtatggatagttctatatgttggtgtggctttgttagatgtatacatgcttagatacatgaagcaacgtgctgctactgtttagtaattgctgttcatttgtctaataaacagataaggatatgtatttatgttgctgttggttttgctggtactttgttggatacaaatgcttcaatacagaaaacagcatgctgctacgatttaccatttatctaatcttatcatatgtctaatctaataaacaaacatgcttttaaattatcttcatatgcttggatgatggcatacacagcggctatgtgtggttttttaaatacccagcatcatgggcatgcatgacactgctttaatatgctttttatttgcttgagactgtttcttttgtttatactgaccctttagttcggtgactcttctgcaggtcgactttaacttagcctaggatccatggcccagtccaagcacggcctgaccaaggagatgaccatgaagtaccgcatggagggctgcgtggacggccacaagttcgtgatcaccggcgagggcatcggctaccccttcaagggcaagcaggccatcaacctgtgcgtggtggagggcggccccttgcccttcgccgaggacatcttgtccgccgccttcatgtacggcaaccgcgtgttcaccgagtacccccaggacatcgtcgactacttcaagaactcctgccccgccggctacacctgggaccgctccttcctgttcgaggacggcgccgtgtgcatctgcaacgccgacatcaccgtgagcgtggaggagaactgcatgtaccacgagtccaagttctacggcgtgaacttccccgccgacggccccgtgatgaagaagatgaccgacaactgggagccctcctgcgagaagatcatccccgtgcccaagcagggcatcttgaagggcgacgtgagcatgtacctgctgctgaaggacggtggccgcttgcgctgccagttcgacaccgtgtacaaggccaagtccgtgccccgcaagatgcccgactggcacttcatccagcacaagctgacccgcgaggaccgcagcgacgccaagaaccagaagtggcacctgaccgagcacgccatcgcctccggctccgccttgccctccggactcagatctcgatagggtaccaatggccagttaacagatccagctgctgctgttctagggttcacaagtctgcctatttgtcttccccaatggagctatggttgtctggtctggtccttggtcgtgtcccgtttcattgtgtactatttacctgtaatgtgtatccttaagtctggtttgatggtgtctgaaacgttttgctgtggtagagcagcatggaagaactataatgaataagtgatccctaatcattgtgtccaaattttgcttctgctatacccttttgtgctgtttcttatgttttgcttaaaaatttgatctgacaaacaaatttgtctaaattatgctcttgttctgactgtgtactgtacacatttgtattgctaccggtttggcacatagttttctctttgattgcagatcaaacccttctgattgcagattgcttggctatggctgatgtgctcactgttcttctttagcttgtatattgctgatggtggcttggctacggctgaaaaagttgctgctgcgccgacttggcaactgttgctccagtaatgctttgtcctctcttcctagccgccgacttggcacttggcagctgttgctcctgtaatgcgttgttatctcttatctcttgagatgtactatgattttgaggctgtttgacttgtgccagattgccagtgctgatgctatattatctcaggtttttatgctagtatatgttttactgtgtgctgcctgtgtcgagttacgtaatctattgaaccgctatgcgtgttgatgccctgttgttgcttgccagattgatgcccctgttgcttgcagcttgcaagctgtagtgaaatcctaaaattcgaaaccaaatctattctgaacttttgaagatctgtgatgtccggaagaaaagattcaaacagataaacgggactctccagaatctataaaataaatgatcgacaaacgctttgctttggtaggcttcctagttagttagcggaccgaagcttcggtccgggcctagaaggccagcttcggccgcccctcggtaccctgggatctgcccttactttaacgcctctaaccaacacccctttatctttataaggaacaataaacagaatttgccccactgttctaaatcacctaataatatccccagctaaaaacaataaaggtttcctagaattaagacaagcatgactgttcctccaggagggtttggaacattgttgcagtcttgcagatacgggcgaagggtgagaaacagagcggagggctggaggtgacctcggtagtcgacgccggagttgagcttgacaacgacggggcggcccctgatggacttgaggaagtccgatggcgtcttcaccgtcccgccggcgcccgaggcgggcctgtcgctgccgccgccgccgctgctcatcttgcgcgctgtgcccccggcggtgtccctgtgttgcggatcgcgggtgggccaggtggatgcgagggcgacccgtttggactccggccggagccgccggatccctggtcggtgtcagtgccgtttactctgggccccacgtgtcagtaccgtctgtagatgacaacaacccgtcgtccacagtcatgtccaaaatatcctttcttcttttttttcgattcggatatctatcttccttttttttttccaaaaatcttcttgacgcaccagcgcgcacgtttgtggtaaacgccgacacgtcggtcccacgtcgatagaccccacccaccagtgagtagcgtgtacgtattcgggggtgacggacgtgtcgccgtcgtcttgctagtcccattcccatctgagccacacatctctgaacaaaaaaaaggagggaggcctccacgcacatccccctccgtgccacccgccccaaaccctcgcgccgcctccgagacagccgccgcaaccatggccaccgccgccgccgcgtctaccgcgctcactggcgccactaccgctgcgcccaaggcgaggcgccgggcgcacctcctggccacccgccgcgccctcgccgcgcccatcaggtgctcagcggcgtcacccgccatgccgatggctcccccggccaccccgctccggccgtggggccccaccgagccccgcaagggtgctgacatcctcgtcgagtccctcgagcgctgcggcgtccgcgacgtcttcgcctaccccggcggcgcgtccatggagatccaccaggcactcacccgctcccccgtcatcgccaaccacctcttccgccacgagcaaggggaggcctttgccgcctccggctacgcgcgctcctcgggccgcgtcggcgtctgcatcgccacctccggccccggcgccaccaacctagtctccgcgctcgccgacgcgctgctcgattccgtccccatggtcgccatcacgggacaggtggcgcgacgcatgattggcaccgacgccttccaggagacgcccatcgtcgaggtcacccgctccatcaccaagcacaactacctggtcctcgacgtcgacgacatcccccgcgtcgtgcaggaggctttcttcctcgcctcctctggtcgaccagggccggtgcttgtcgacatccccaaggacatccagcagcagatggcggtgcctgtctgggacaagcccatgagtctgcctgggtacattgcgcgccttcccaagccccctgcgactgagttgcttgagcaggtgctgcgtcttgttggtgaatcgcggcgccctgttctttatgtgggcggtggctgcgcagcatctggtgaggagttgcgacgctttgtggagctgactggaatcccggtcacaactactcttatgggcctcggcaacttccccagcgacgacccactgtctctgcgcatgctaggtatgcatgggacggtgtatgcaaattatgcagtggataaggccgatctgttgcttgcacttggtgtgcggtttgatgatcgcgtgacagggaagattgaggcttttgcaagcagggctaagattgtgcacgttgatattgatccggctgagattggcaagaacaagcagccacatgtgtccatctgtgcagatgttaagcttgctttgcagggcatgaatgctcttcttgaaggaagcacatcaaagaagagctttgactttggctcatggaacgatgagttggatcagcagaagagggaattcccccttgggtataaaacatctaatgaggagatccagccacaatatgctattcaggttcttgatgagctgacgaaaggcgaggccatcatcggcacaggtgttgggcagcaccagatgtgggcggcacagtactacacttacaagcggccaaggcagtggttgtcttcagctggtcttggggctatgggatttggtttgccggctgctgctggtgcttctgtggcaaacccaggtgtcactgttgttgacatcgatggagatggtagctttctcatgaacgttcaggagctagctatgatccgaattgagaacctcccagtgaaggtctttgtgctaaacaaccagcacctggggatggtggtgcagttggaggacaggttctataaggccaacagagcgcacacatacttgggaaacccagagaatgaaagtgagatatatccagatttcgtgacgatcgccaaagggttcaacattccagccgtccgtgtgacaaagaagaacgaagtccgcgcagcgataaagaagatgctcgagactccagggccgtacctcttggatataatcgtcccacaccaggagcatgtgttgcctatgatccctagtggtggggctttcaaggatatgatcctggatggtgatggcaggactgtgtactgacttcgaataggtacccggggatcctctagtgccgtgggtcgtttaagctgccgctgtacctgtgtcgtctggtgccttctggtgtacctgggaggttgtcgtctatcaagtatctgtggttggtgtcatgagtcagtgagtcccaatactgttcgtgtcctgtgtgcattatacccaaaactgttatgggcaaatcatgaataagcttgatgttcgaacttaaaagtctctgctcaatatggtattatggttgtttttgttcgtctcctaatatttgcctgggatcaaattttattggctggtgttcatttgacctccatgttcttgctaggctccattttttactctacagccataatatgtttgattgtttggtttgttctttgttgtacacctggttctgtcgagcttagttttcgacactggcttacagcttaacatgttgctattttattgggttctgattgctattttattgggttctgattgctagtttttgctgaatccaaaaaccatgttatttatttaagcgatccaggttattattatgatggtggctaagtttttttttttccaagggtaaattttctggattctccagtgtttctgtggccgaattcaatcactagagtcgacctgcaaagcttcggtccgggcctagaaggcccgcgccacttacgcttgattccgatgacttcgtaggttcctagctcaagccgctcgtgtccaagcgtcacttacgattagctaatgattacggcatctaggaccgactagttcttatgtgcttctagtctccaaatgtggttgatagttattttgctctaagatcaacagtaatgaagtataaatcatcgttgtggtgtgctactcggttaattgagcattaacacacacaaacatgacgaggatggtataatctccaaaaatgtgtactttgttaggtgggaccctatagccttgattaatgtgctatgttaggcatgcctggaaacgtgtgacgcatatgttttgtgaacctgttgatattatatgtgcttttatattaccatattttattaaaatactaatatttattactagtaagatataacattctatctagcttaaaaactaaccataaatattccataataactagatttaccaaactaatatactaaatatacataataaatacaaaattaacaagacaataatcaatatttatgagcttaatatatttagacattatggttggtcgacgataatcatgctaacttttcgtaattgcttgattgaaatatgcttagaataatgcctctttgttctacatggcaaatagggaccattatggtgtaacaccctgggaaccacaaacaccccgaaatgctactaaactacacaactaaccttcatatataaaatttcgacagcatctcctttgaaaatttgcatagacgtggaagcaacagagtataaacagatctgcgtttaaacgtgcaagcgctactagacaattcagtacattaaaaacgtccgcaatgtgttattaagttgtctaagcgtcaatttgtttacaccacaatatatcctgcca

SEQ ID NO: 148 - DNA, 20911 bp, unidentified
  source 1..20911: mol_type = other DNA; note = Artificial
gtttacccgccaatatatcctgtcaaacactgcggccgcacttgaccgcggatggagccggagctgtggtgaggccatcgacgggaggtgggggagaacacagtctcagtgttctttgtgagtccgcaaggtttttagcttttctgtattaattaaggttgctgttggctgtagaatacggtcgtggaagagctgtatcggtagctactacgtaagctattatatactggaagtctggagctcgtcgatctccggtcgtcttcctccatttctcctcgtcttgctttgactgctgctaccatttgcttctgttttctgatgaagcatgccatgtcggccaccagtgtttgtgtggtttttgcagggaatggctttcaagtgctgtgattgaatggccctcgtcgtcctcggctgagctcacatggacgcgtcatgtgagtgagatatatgatcatatgatgagtggggttcgggtgagtgcgtacttgaagtaggatcccgctttcactcattcattcattggcctttaaaccgggaaattttcgcgaggagatggagggaagcaagcagggtgacgagtgcagagtgccgcgagcgctttgtcaaaaggcaccgccgtaggcaaaaaaatcaatggccctgactgactcgatggtagtactactgtagagactagagagggttgctccccatatcttcgtgtgacttttactccagcattgcatttccgtcattgagacgttaattaatagcagctttcgggacagatgactgtggccatgtttcgtcacggccgcttcgtgccagctgggggtactatagtactgtgattttgttagtaaaaactttcattaggccaccattgacgaccgggccttcgcttttgctgcgctaattaaccatttcccggcgaccgaagggaacatgaacatgccccgacacatgagggcatgaggactagtgttctccctgtcgttcgttgacttgactagtgatagtttaaacgctcttcaactggaagagcggttactaccggttcactagctagctgctaatcgagctagttaccctatgaggtgacatgaagcgctcacggttactatgacggttagcttcacgactgttggtggcagtagcgtacgacttagctatagttccggacttacctagctaataacttcgtatagcatacattatacgaagttatggttaccgagctccaccttgctagttggatattacctcttctcttcaaagtatccttgaacgctcaccggttatcaaatctctacactatagctctgtagtcttgctagatagttagttctttagctctctctagaggttcacaaactcaatacaacacacagtggagtagggtattacgctccggcggcccgaaccactctaaatccttgtgtcctcgtgtgctcttccaccattaatgactgtaattgcagggacacgaagagttgtagcgcttttgccaacaagatccgctatatgctagtagagtggaacctgcacagcaacaagcatccaataatctgagaataagaattatgtgtggtgatggttctcatctctgcaactcgccattttcgcgagagaaccaaatccaagttggtgaagatcatgatttgggctcatgggctggcatagtagctattacctttgcaattgtggttcgaatctatccgatattctccttttcagggagagctaatgcttatgcttattgggtattttggtttgacactgcttcacgcccaaaaaaaggcaactatgtctgagttggatatggcccaaaaaaaggcagctatgtctgagttggatatggaagtcttctttcgtttagggtgaagtaagaccaagctcatgagcttattatcttaggtcggaacaaattagttgataggcatggcacatttatcaaattataatgattttaacagaaaagcaacacctctttttcagcagcaccagctttgcaagctgcaattgacactccaagcatagtatttgctccaaactcagcctgcatttcgcacaatatcatatctatttccatttggataaaatatattttccagaaatatgggaacagaatcaagatacagaaaaaagttgtggtagtagtggtaagtggaaacacaagtacagtgaaaagatagcattatttctgaacagtcaaattaaccgaaataagtagtatcacatactgcccctaaattgactacacccaatgtaaagaattgcttgagcatattgagccatcagttgtttgtttgtgtaacggatttgacaatgcagagttcaggagcaaaaaaccgcaaaggagagaaagagggaaaggatctcctagtatcccaccttgtggcgcgccctgtcaagtgcatgatggcctggtcgatctgcgtctgctgctgcggttccatcccaacgagtgcctccgacaccttgtcgttgatcacccgcaccgcgtaggcgacccccctggcgaggaacttccgcctctcggaggccccggccgcgtcggcggcggcgccctcgagcgcgcccacgctagccgtagatgctcggtgcacggccttgttggtgtgcaactcgacctcaacggccggtgcgctacgcccgtcaaggatctggcgcgcccgcaccctcgtgatcacggtgggcgcctcccgcctcatgtggccgacgatgaaaagcgccgggttaggggccttggcgcgcaccgccgtattcagggcctcctcgctcttgcgcgagagcaggtgcttccccaggtactcctgcactgacaaggctgccacagcggtggaatttgtcctcacgacttcgccacgtcgtcctcacctccctggcttcccacgactccgccgtatcgaggtgctcggtgggtcgtcttaatccgaagtccgaactaggaagacgagacagagaggtctgaggaatgggcctcgtttgatgttgagctgaattatttttccagcataagcccaggtcttggtccatgaacaaaattactagaaacccagcccagtactacgatctaaaagagggactgccactggatagctctctctagcattctccacgctccaatacagcggcgtcgtgtctatccgggtctatccgcgaacacgtgagaactctccagaaactgctttctcctccacttcatctctctcgctttccctctataaaaagaccccttctaggaattgagggagacagcaagcaccaagcagcgatccgaagctcaatcaattcactcaaacctcttccccaaatcttcgattagatcttcgttgacaagaagactagaaccgaacctgacatgtccaacctgctcacggttcaccagaaccttccggctcttccagtggacgcgacgtccgatgaagtcaggaagaacctcatggacatgttccgcgacaggcaagcgttcagcgagcacacctggaagatgctgctctccgtctgccgctcctgggctgcatggtgcaagctgaacaacaggaagtggttccccgctgagcccgaggacgtgagggattaccttctgtacctgcaagcgcgaggtttgtttctgcttctacctttgatatatatataataattatcattaattagtagtaatataatatttcaaatatttttttcaaaataaaagaatgtagtatatagcaattgcttttctgtagtttataagtgtgtatattttaatttataacttttctaatatatgaccaaaacatggtgatgcctaggtctggcagtgaagaccatccagcaacaccttggacaactgaacatgcttcacaggcgctccggcctcccgcgccccagcgactcgaacgccgtgagcctcgtcatgcgccgcatcaggaaggaaaacgtcgatgccggcgaaagggcaaagcaggccctcgcgttcgagaggaccgatttcgaccaggtccgcagcctgatggagaacagcgacaggtgccaggacattaggaacctggcgttcctcggaattgcatacaacacgctcctcaggatcgcggaaattgcccgcattcgcgtgaaggacattagccgcaccgacggcggcaggatgcttatccacattggcaggaccaagacgctcgtttccaccgcaggcgtcgaaaaggccctcagcctcggagtgaccaagctcgtcgaacgctggatctccgtgtccggcgtcgcggacgacccaaacaactacctcttctgccgcgtccgcaagaacggggtggctgcccctagcgccaccagccaactcagcacgagggccttggaaggtattttcgaggccacccaccgcctgatctacggcgcgaaggatgacagcggtcaacgctacctcgcatggtccgggcactccgcccgcgttggagctgctagggacatggcccgcgccggtgtttccatccccgaaatcatgcaggcgggtggatggacgaacgtgaacattgtcatgaactacattcgcaaccttgacagcgagacgggcgcaatggttcgcctcctggaagatggtgactgaggtacccaacctagacttgtccatcttctggattggccaacttaattaatgtatgaaataaaaggatgcacacatagtgacatgctaatcactataatgtgggcatcaaagttgtgtgttatgtgtaattactagttatctgaataaaagagaaagagatcatccatatttcttatcctaaatgaatgtcacgtgtctttataattctttgatgaaccagatgcatttcattaaccaaatccatatacatataaatattaatcatatataattaatatcaattgggttagcaaaacaaatctagtctaggtgtgttttgcgatccgatatcgattggtcggcagaatcccatcaaagatgtgatcatttctaccgacccaaatgagttcattagtatgataattttcatgtagagagaggcttccaattatcttccttcttaaaacttcaacccttccaggctccatagtgcgtaatcaattcctctcctatagccacgtccgtcctcacctcacgccgcccagggccctggccgaagcttacactgatagtttaaactgaaggcgggaaacgacaatctgatcatgagcggagaattaagggagtcacgttatgacccccgccgatgacgcgggacaagccgttttacgtttggaactgacagaaccgcaacgattgaaggagccactcagccgcgggtttctggagtttaatgagctaagcacatacgtcagaaaccattattgcgcgttcaaaagtcgcctaaggtcactatcagctagcaaatatttcttgtcaaaaatgctccactgacgttccataaattcccctcggtatccaattagagtctcatattcactcccatggcggccaatgcgggcggcggtggagcgggaggaggcagcggcagcggcagcgtggctgcgccggcggtgtgccgccccagcggctcgcggtggacgccgacgccggagcagatcaggatgctgaaggagctctactacggctgcggcatccggtcgcccagctcggagcagatccagcgcatcaccgccatgctgcggcagcacggcaagatcgagggcaagaacgtcttctactggttccagaaccacaaggcccgcgagcgccagaagcgccgcctcaccagcctcgacgtcaacgtgcccgccgccggcgcggccgacgccaccaccagccaactcggcgtcctctcgctgtcgtcgccgccgccttcaggcgcggcgcctccctcgcccaccctcggcttctacgccgccggcaatggcggcggatcggctgtgctgctggacacgagttccgactggggcagcagcggcgctgctatggccaccgagacatgcttcctgcaggactacatgggcgtgacggacacgggcagctcgtcgcagtggccacgcttctcgtcgtcggacacgataatggcggcggccgcggcgcgggcggcgacgacgcgggcgcccgagacgctccctctcttcccgacctgcggcgacgacggcggcagcggtagcagcagctacttgccgttctggggtgccgcgtccacaactgccggcgccacttcttccgttgcgatccaacagcaacaccagctgcaggagcagtacagcttttacagcaacagcaacagcacccagctggccggcaccggcaaccaagacgtatcggcaacagcagcagcagccgccgccctggagctgagcctcagctcatggtgctccccttaccctgctgcagggagtatgtgagatcaacgcgagctgccactgctcttcactgatgtctctggaatggaaggaggaggaagtgagaacagatcattcgacaaagcagcattagtccgttgatcggtggaagaccactcgtcagtgttgagttgaatgtttgatcaataaaatacggcaatgctgtaagggttgttttttatgccattgataatacactgtactgttcagttgttgaactctatttcttagccatgccaagtgcttttcttattttgaataacattacagcaaaaagttgaaagacaaaaaaaaaaacccccgaacagagtgctttgggtcccaagcttctttagactgtgttcggcgttccccctaaatttctccccctatatctcactcacttgtcacatcagcgttctctttccccctatatctccacgctctacagcagttccacctatatcaaacctctataccccaccacaacaatattatatactttcatcttcaactaactcatgtaccttccaatttttttctactaataattatttacgtgcacagaaacttagcaaggagagagagagcgggaatttaaatgctcggcgttaggcttttagtccgctaggtggctagaccgaggttaggacgctagttcactaggggcctagtggtgttttaagacgtcacggtcaccgcggccgcatcgagcagctggcttgtggggaccagacaaaaaaggaatggtgcagaattgttaggcgcacctaccaaaagcatctttgcctttattgcaaagataaagcagattcctctagtacaagtggggaacaaaataacgtggaaaagagctgtcctgacagcccactcactaatgcgtatgacgaacgcagtgacgaccacaaaactcgagcaacgagatcatgagccaatcaaagaggagtgatgtagacctaaagcaataatggagccatgacgtaagggcttacgcccatacgaaataattaaaggctgatgtgacctgtcggtctctcagaacctttactttttatgtttggcgtgtatttttaaatttccacggcaatgacgatgtgaccgtcgacccactaaaacattgctttgtcaaaagctaaaaaagatgatgcccgacagccacttgtgtgaagcatgagaagccggtccctccactaagaaaattagtgaagcatcttccagtggtccctccactcacagctcaatcagtgagcaacaggacgaaggaaatgacgtaagccatgacgtctaatcccattcgaaacgcgtggaccgaagcttgcatgcctgcagtgcagcgtgacccggtcgtgcccctctctagagataatgagcattgcatgtctaagttataaaaaattaccacatattttttttgtcacacttgtttgaagtgcagtttatctatctttatacatatatttaaactttactctacgaataatataatctatagtactacaataatatcagtgttttagagaatcatataaatgaacagttagacatggtctaaaggacaattgagtattttgacaacaggactctacagttttatctttttagtgtgcatgtgttctcctttttttttgcaaatagcttcacctatataatacttcatccattttattagtacatccatttagggtttagggttaatggtttttatagactaatttttttagtacatctattttattctattttagcctctaaattaagaaaactaaaactctattttagtttttttatttaataatttagatataaaatagaataaaataaagtgactaaaaattaaacaaataccctttaagaaattaaaaaaactaaggaaacatttttcttgtttcgagtagataatgccagcctgttaaacgccgtcgacgagtctaacggacaccaaccagcgaaccagcagcgtcgcgtcgggccaagcgaagcagacggcacggcatctctgtcgctgcctctggacccctctcgagagttccgctccaccgttggacttgctccgctgtcggcatccagaaattgcgtggcggagcggcagacgtgagccggcacggcaggcggcctcctcctcctctcacggcaccggcagctacgggggattcctttcccaccgctccttcgctttcccttcctcgcccgccgtaataaatagacaccccctccacaccctctttccccaacctcgtgttgttcggagcgcacacacacacaaccagatctcccccaaatccacccgtcggcacctccgcttcaaggtacgccgctcgtcctcccccccccccctctctaccttctctagatcggcgttccggtccatgcatggttagggcccggtagttctacttctgttcatgtttgtgttagatccgtgtttgtgttagatccgtgctgctagcgttcgtacacggatgcgacctgtacgtcagacacgttctgattgctaacttgccagtgtttctctttggggaatcctgggatggctctagccgttccgcagacgggatcgatttcatgattttttttgtttcgttgcatagggtttggtttgcccttttcctttatttcaatatatgccgtgcacttgtttgtcgggtcatcttttcatgcttttttttgtcttggttgtgatgatgtggtctggttgggcggtcgttctagatcggagtagaattctgtttcaaactacctggtggatttattaattttggatctgtatgtgtgtgccatacatattcatagttacgaattgaagatgatggatggaaatatcgatctaggataggtatacatgttgatgcgggttttactgatgcatatacagagatgctttttgttcgcttggttgtgatgatgtggtgtggttgggcggtcgttcattcgttctagatcggagtagaatactgtttcaaactacctggtgtatttattaattttggaactgtatgtgtgtgtcatacatcttcatagttacgagtttaagatggatggaaatatcgatctaggataggtatacatgttgatgtgggttttactgatgcatatacatgatggcatatgcagcatctattcatatgctctaaccttgagtacctatctattataataaacaagtatgttttataattattttgatcttgatatacttggatgatggcatatgcagcagctatatgtggatttttttagccctgccttcatacgctatttatttgcttggtactgtttcttttgtcgatgctcaccctgttgtttggtgttacttctgcaggtcgactttaacttagcctaggatccatggccactgtgaacaactggctcgctttctccctctccccgcaggagctgccgccctcccagacgacggactccacactcatctcggccgccaccgccgaccatgtctccggcgatgtctgcttcaacatcccccaagattggagcatgaggggatcagagctttcggcgctcgtcgcggagccgaagctggaggacttcctcggcggcatctccttctccgagcagcatcacaaggccaactgcaacatgatacccagcactagcagcacagtttgctacgcgagctcaggtgctagcaccggctaccatcaccagctgtaccaccagcccaccagctcagcgctccacttcgcggactccgtaatggtggcttcctcggccggtgtccacgacggcggtgccatgctcagcgcggccgccgctaacggtgtcgctggcgctgccagtgccaacggcggcggcatcgggctgtccatgattaagaactggctgcggagccaaccggcgcccatgcagccgagggtggcggcggctgagggcgcgcaggggctctctttgtccatgaacatggcggggacgacccaaggcgctgctggcatgccacttctcgctggagagcgcgcacgggcgcccgagagtgtatcgacgtcagcacagggtggagccgtcgtcgtcacggcgccgaaggaggatagcggtggcagcggtgttgccggcgctctagtagccgtgagcacggacacgggtggcagcggcggcgcgtcggctgacaacacggcaaggaagacggtggacacgttcgggcagcgcacgtcgatttaccgtggcgtgacaaggcatagatggactgggagatatgaggcacatctttgggataacagttgcagaagggaagggcaaactcgtaagggtcgtcaagtctatttaggtggctatgataaagaggagaaagctgctagggcttatgatcttgctgctctgaagtactggggtgccacaacaacaacaaattttccagtgagtaactacgaaaaggagctcgaggacatgaagcacatgacaaggcaggagtttgtagcgtctctgagaaggaagagcagtggtttctccagaggtgcatccatttacaggggagtgactaggcatcaccaacatggaagatggcaagcacggattggacgagttgcagggaacaaggatctttacttgggcaccttcagcacccaggaggaggcagcggaggcgtacgacatcgcggcgatcaagttccgcggcctcaacgccgtcaccaacttcgacatgagccgctacgacgtgaagagcatcctggacagcagcgccctccccatcggcagcgccgccaagcgcctcaaggaggccgaggccgcagcgtccgcgcagcaccaccacgccggcgtggtgagctacgacgtcggccgcatcgcctcgcagctcggcgacggcggagccctggcggcggcgtacggcgcgcactaccacggcgccgcctggccgaccatcgcgttccagccgggcgccgccagcacaggcctgtaccacccgtacgcgcagcagccaatgcgcggcggcgggtggtgcaagcaggagcaggaccacgcggtgatcgcggccgcgcacagcctgcaggacctccaccacctgaacctgggcgcggccggcgcgcacgactttttctcggcagggcagcaggccgccgccgctgcgatgcacggcctgggtagcatcgacagtgcgtcgctcgagcacagcaccggctccaactccgtcgtctacaacggcggggtcggcgacagcaacggcgccagcgccgtcggcggcagtggcggtggctacatgatgccgatgagcgctgccggagcaaccactacatcggcaatggtgagccacgagcaggtgcatgcacgggcctacgacgaagccaagcaggctgctcagatggggtacgagagctacctggtgaacgcggagaacaatggtggcggaaggatgtctgcatgggggactgtcgtgtctgcagccgcggcggcagcagcaagcagcaacgacaacatggccgccgacgtcgggcatggcggcgcgcagctcttcagtgtctggaacgacacttaagcgtacctagtggtacctgacatcttatagtctgcaacctctcgtgtctgaattcctatctttatcaagtgttattgcttccacgactataggacagctttcgtcgaaagcttttgctcatgtgatctcgaaggattcatctagtctgatttttcgtgacttgtatcggttttattggattcatccaacatatatcaataaaaaatgagttgtgtttcctttcttcctagttcagttaaaattatttccctcctgcgcttgtgctgtaattgtctgtgtacctgttgtttgtgactgtgttagttcccttggatatgatttcgtatttgatatgtacatggagatagcttagcttcattattggagtatgaagttagtatgacatagtcactctcctggaaaattgacactgcaaaccatatttttattctgaaccacaaatcctagtcagtccgctggcatatgccgtccgtttgctgaatccagaacgtgggtttggagatgtacggctgagatgcctctatgcgaaggggatttcgtggtgaaacgagatgggagtagagcaacgcccgtggaagatgcttcaaacttccacacttttgagcaacgatcggcagtagtaaggtagacgatttcaagatcaaagcatatgaagataaacaacatcaacaacaaaatttgttggggttctatagagagaaacagagctacatacatacactgttttgtatctaccatctgagatgatgaaaagatgaaaaactaaagaatgccccggcgccaacgccaggacacgccgcgcgcgcgtcacccgagccatctcttgacccagccggcgctgtatatttacacacgttgcagcatcgatcaccacctgttcgatcgcgtcgccgtcaccggcgcgccgcgacttattgaactagtctagggcgcggctaacaacctagcttagattgccttgtctaaacccttaggctaacgcgccactctagacgtgcgcacgataacttcgtatagcatacattatacgaagttataacagcggaccgggttaccgaattcctgcccttaaggccaattgttcaagattcattcaacaattgaaacatctcccatgattaaatcagtataaggttgctatggtcttgcttgacaaagtttttttttgagggaatttcaactaaatttttgagtgaaactatcaaatactgattttaaaaaatttttataaaaggaagcgcagagataaaaggccatctatgctacaaaagtacccaaaaatgtaatcctaaagtatgaattgcattttttttttgtttggacgaaaggaaaggagtattaccacaagaatgatatcatcttcatatttagatcttttttgggtaaagcttgagattctctaaatatagagaaatcagaagaaaaaaaaaccgtgttttggtggttttgatttctagcctccacaataactttgacggcgtcgacaagtctaacggacaccaagcagcgaaccaccagcgccgagccaagcgaagcagacggccgagacgttgacaccttcggcgcggcatctctcgagagttccgctccggcgctccacctccaccgctggcggtttcttattccgttccgttccgcctcctgctctgctcctctccacaccacacggcacgaaaccgttacggcaccggcagcacccagcacgggagaggggattcctttcccaccgttccttccctttccgccccgccgctataaatagccagccccatccccagcttttttccccaatctcatctcctctctcctgttgttcggagcacacgcacaatccgatcgatccccaaatccccttcgtctctcctcgcgagcctcgtggatcccagcttcaaggtacggcgatcgatcatcccccctccttctctctaccttcttttctctagactacatcggatggcgatccatggttagggcctgctagtttcccttcctgttttgtcgatggctgcgaggcacaatagatctgatggcgttatgacggctaacttgtcatgttgttgcgatttatagtccctttaggagatcagtttaatttctcggatggttcgagatcggtggtccatggttagtaccctaagatccgcgctgttagggttcgtagatggaggcgacctgttctgattgttaacttgtcagtacctgggaaatcctgggatggttctagctcgtccgcagatgagatcgatttcatgatcctctgtatcttgtttcgttgcctaggttccgtctaatctatccgtggtatgatgtagatgttttgatcgtgctaactacgtcttgtaaagttaattgtcaggtcataatttttagcatgcctttttttttgtttggttttgtctaattgggctgtcgttctagatcagagtagaagactgttccaaactacctgctggatttattgaacttggatctgtatgtgtgtcacatatcttcataaattcatgattaagatggattgaaatatcttttatctttttggtatggatagttctatatgttggtgtggctttgttagatgtatacatgcttagatacatgaagcaacgtgctgctactgtttagtaattgctgttcatttgtctaataaacagataaggatatgtatttatgttgctgttggttttgctggtactttgttggatacaaatgcttcaatacagaaaacagcatgctgctacgatttaccatttatctaatcttatcatatgtctaatctaataaacaaacatgcttttaaattatcttcatatgcttggatgatggcatacacagcggctatgtgtggttttttaaatacccagcatcatgggcatgcatgacactgctttaatatgctttttatttgcttgagactgtttcttttgtttatactgaccctttagttcggtgactcttctgcaggtcgactttaacttagcctaggatccatggcccagtccaagcacggcctgaccaaggagatgaccatgaagtaccgcatggagggctgcgtggacggccacaagttcgtgatcaccggcgagggcatcggctaccccttcaagggcaagcaggccatcaacctgtgcgtggtggagggcggccccttgcccttcgccgaggacatcttgtccgccgccttcatgtacggcaaccgcgtgttcaccgagtacccccaggacatcgtcgactacttcaagaactcctgccccgccggctacacctgggaccgctccttcctgttcgaggacggcgccgtgtgcatctgcaacgccgacatcaccgtgagcgtggaggagaactgcatgtaccacgagtccaagttctacggcgtgaacttccccgccgacggccccgtgatgaagaagatgaccgacaactgggagccctcctgcgagaagatcatccccgtgcccaagcagggcatcttgaagggcgacgtgagcatgtacctgctgctgaaggacggtggccgcttgcgctgccagttcgacaccgtgtacaaggccaagtccgtgccccgcaagatgcccgactggcacttcatccagcacaagctgacccgcgaggaccgcagcgacgccaagaaccagaagtggcacctgaccgagcacgccatcgcctccggctccgccttgccctccggactcagatctcgatagggtaccaatggccagttaacagatccagctgctgctgttctagggttcacaagtctgcctatttgtcttccccaatggagctatggttgtctggtctggtccttggtcgtgtcccgtttcattgtgtactatttacctgtaatgtgtatccttaagtctggtttgatggtgtctgaaacgttttgctgtggtagagcagcatggaagaactataatgaataagtgatccctaatcattgtgtccaaattttgcttctgctatacccttttgtgctgtttcttatgttttgcttaaaaatttgatctgacaaacaaatttgtctaaattatgctcttgttctgactgtgtactgtacacatttgtattgctaccggtttggcacatagttttctctttgattgcagatcaaacccttctgattgcagattgcttggctatggctgatgtgctcactgttcttctttagcttgtatattgctgatggtggcttggctacggctgaaaaagttgctgctgcgccgacttggcaactgttgctccagtaatgctttgtcctctcttcctagccgccgacttggcacttggcagctgttgctcctgtaatgcgttgttatctcttatctcttgagatgtactatgattttgaggctgtttgacttgtgccagattgccagtgctgatgctatattatctcaggtttttatgctagtatatgttttactgtgtgctgcctgtgtcgagttacgtaatctattgaaccgctatgcgtgttgatgccctgttgttgcttgccagattgatgcccctgttgcttgcagcttgcaagctgtagtgaaatcctaaaattcgaaaccaaatctattctgaacttttgaagatctgtgatgtccggaagaaaagattcaaacagataaacgggactctccagaatctataaaataaatgatcgacaaacgctttgctttggtaggcttcctagttagttagcggaccgaagcttcggtccgggcctagaaggccagcttcggccgcccctcggtaccctgggatctgcccttactttaacgcctctaaccaacacccctttatctttataaggaacaataaacagaatttgccccactgttctaaatcacctaataatatccccagctaaaaacaataaaggtttcctagaattaagacaagcatgactgttcctccaggagggtttggaacattgttgcagtcttgcagatacgggcgaagggtgagaaacagagcggagggctggaggtgacctcggtagtcgacgccggagttgagcttgacaacgacggggcggcccctgatggacttgaggaagtccgatggcgtcttcaccgtcccgccggcgcccgaggcgggcctgtcgctgccgccgccgccgctgctcatcttgcgcgctgtgcccccggcggtgtccctgtgttgcggatcgcgggtgggccaggtggatgcgagggcgacccgtttggactccggccggagccgccggatccctggtcggtgtcagtgccgtttactctgggccccacgtgtcagtaccgtctgtagatgacaacaacccgtcgtccacagtcatgtccaaaatatcctttcttcttttttttcgattcggatatctatcttccttttttttttccaaaaatcttcttgacgcaccagcgcgcacgtttgtggtaaacgccgacacgtcggtcccacgtcgatagaccccacccaccagtgagtagcgtgtacgtattcgggggtgacggacgtgtcgccgtcgtcttgctagtcccattcccatctgagccacacatctctgaacaaaaaaaaggagggaggcctccacgcacatccccctccgtgccacccgccccaaaccctcgcgccgcctccgagacagccgccgcaaccatggccaccgccgccgccgcgtctaccgcgctcactggcgccactaccgctgcgcccaaggcgaggcgccgggcgcacctcctggccacccgccgcgccctcgccgcgcccatcaggtgctcagcggcgtcacccgccatgccgatggctcccccggccaccccgctccggccgtggggccccaccgagccccgcaagggtgctgacatcctcgtcgagtccctcgagcgctgcggcgtccgcgacgtcttcgcctaccccggcggcgcgtccatggagatccaccaggcactcacccgctcccccgtcatcgccaaccacctcttccgccacgagcaaggggaggcctttgccgcctccggctacgcgcgctcctcgggccgcgtcggcgtctgcatcgccacctccggccccggcgccaccaacctagtctccgcgctcgccgacgcgctgctcgattccgtccccatggtcgccatcacgggacaggtggcgcgacgcatgattggcaccgacgccttccaggagacgcccatcgtcgaggtcacccgctccatcaccaagcacaactacctggtcctcgacgtcgacgacatcccccgcgtcgtgcaggaggctttcttcctcgcctcctctggtcgaccagggccggtgcttgtcgacatccccaaggacatccagcagcagatggcggtgcctgtctgggacaagcccatgagtctgcctgggtacattgcgcgccttcccaagccccctgcgactgagttgcttgagcaggtgctgcgtcttgttggtgaatcgcggcgccctgttctttatgtgggcggtggctgcgcagcatctggtgaggagttgcgacgctttgtggagctgactggaatcccggtcacaactactcttatgggcctcggcaacttccccagcgacgacccactgtctctgcgcatgctaggtatgcatgggacggtgtatgcaaattatgcagtggataaggccgatctgttgcttgcacttggtgtgcggtttgatgatcgcgtgacagggaagattgaggcttttgcaagcagggctaagattgtgcacgttgatattgatccggctgagattggcaagaacaagcagccacatgtgtccatctgtgcagatgttaagcttgctttgcagggcatgaatgctcttcttgaaggaagcacatcaaagaagagctttgactttggctcatggaacgatgagttggatcagcagaagagggaattcccccttgggtataaaacatctaatgaggagatccagccacaatatgctattcaggttcttgatgagctgacgaaaggcgaggccatcatcggcacaggtgttgggcagcaccagatgtgggcggcacagtactacacttacaagcggccaaggcagtggttgtcttcagctggtcttggggctatgggatttggtttgccggctgctgctggtgcttctgtggcaaacccaggtgtcactgttgttgacatcgatggagatggtagctttctcatgaacgttcaggagctagctatgatccgaattgagaacctcccagtgaaggtctttgtgctaaacaaccagcacctggggatggtggtgcagttggaggacaggttctataaggccaacagagcgcacacatacttgggaaacccagagaatgaaagtgagatatatccagatttcgtgacgatcgccaaagggttcaacattccagccgtccgtgtgacaaagaagaacgaagtccgcgcagcgataaagaagatgctcgagactccagggccgtacctcttggatataatcgtcccacaccaggagcatgtgttgcctatgatccctagtggtggggctttcaaggatatgatcctggatggtgatggcaggactgtgtactgacttcgaataggtacccggggatcctctagtgccgtgggtcgtttaagctgccgctgtacctgtgtcgtctggtgccttctggtgtacctgggaggttgtcgtctatcaagtatctgtggttggtgtcatgagtcagtgagtcccaatactgttcgtgtcctgtgtgcattatacccaaaactgttatgggcaaatcatgaataagcttgatgttcgaacttaaaagtctctgctcaatatggtattatggttgtttttgttcgtctcctaatatttgcctgggatcaaattttattggctggtgttcatttgacctccatgttcttgctaggctccattttttactctacagccataatatgtttgattgtttggtttgttctttgttgtacacctggttctgtcgagcttagttttcgacactggcttacagcttaacatgttgctattttattgggttctgattgctattttattgggttctgattgctagtttttgctgaatccaaaaaccatgttatttatttaagcgatccaggttattattatgatggtggctaagtttttttttttccaagggtaaattttctggattctccagtgtttctgtggccgaattcaatcactagagtcgacctgcaaagcttcggtccgggcctagaaggcccgcgccacttacgcttgattccgatgacttcgtaggttcctagctcaagccgctcgtgtccaagcgtcacttacgattagctaatgattacggcatctaggaccgactagttcttatgtgcttctagtctccaaatgtggttgatagttattttgctctaagatcaacagtaatgaagtataaatcatcgttgtggtgtgctactcggttaattgagcattaacacacacaaacatgacgaggatggtataatctccaaaaatgtgtactttgttaggtgggaccctatagccttgattaatgtgctatgttaggcatgcctggaaacgtgtgacgcatatgttttgtgaacctgttgatattatatgtgcttttatattaccatattttattaaaatactaatatttattactagtaagatataacattctatctagcttaaaaactaaccataaatattccataataactagatttaccaaactaatatactaaatatacataataaatacaaaattaacaagacaataatcaatatttatgagcttaatatatttagacattatggttggtcgacgataatcatgctaacttttcgtaattgcttgattgaaatatgcttagaataatgcctctttgttctacatggcaaatagggaccattatggtgtaacaccctgggaaccacaaacaccccgaaatgctactaaactacacaactaaccttcatatataaaatttcgacagcatctcctttgaaaatttgcatagacgtggaagcaacagagtataaacagatctgcgtttaaacgtgcaagcgctactagacaattcagtacattaaaaacgtccgcaatgtgttattaagttgtctaagcgtcaatttgtttacaccacaatatatcctgcca

SEQ ID NO: 149 - DNA, 20854 bp, unidentified
  source 1..20854: mol_type = other DNA; note = Artificial
gtttacccgccaatatatcctgtcaaacactgcggccgcacttgaccgcggatggagccggagctgtggtgaggccatcgacgggaggtgggggagaacacagtctcagtgttctttgtgagtccgcaaggtttttagcttttctgtattaattaaggttgctgttggctgtagaatacggtcgtggaagagctgtatcggtagctactacgtaagctattatatactggaagtctggagctcgtcgatctccggtcgtcttcctccatttctcctcgtcttgctttgactgctgctaccatttgcttctgttttctgatgaagcatgccatgtcggccaccagtgtttgtgtggtttttgcagggaatggctttcaagtgctgtgattgaatggccctcgtcgtcctcggctgagctcacatggacgcgtcatgtgagtgagatatatgatcatatgatgagtggggttcgggtgagtgcgtacttgaagtaggatcccgctttcactcattcattcattggcctttaaaccgggaaattttcgcgaggagatggagggaagcaagcagggtgacgagtgcagagtgccgcgagcgctttgtcaaaaggcaccgccgtaggcaaaaaaatcaatggccctgactgactcgatggtagtactactgtagagactagagagggttgctccccatatcttcgtgtgacttttactccagcattgcatttccgtcattgagacgttaattaatagcagctttcgggacagatgactgtggccatgtttcgtcacggccgcttcgtgccagctgggggtactatagtactgtgattttgttagtaaaaactttcattaggccaccattgacgaccgggccttcgcttttgctgcgctaattaaccatttcccggcgaccgaagggaacatgaacatgccccgacacatgagggcatgaggactagtgttctccctgtcgttcgttgacttgactagtgatagtttaaacgctcttcaactggaagagcggttactaccggttcactagctagctgctaatcgagctagttaccctatgaggtgacatgaagcgctcacggttactatgacggttagcttcacgactgttggtggcagtagcgtacgacttagctatagttccggacttacctagctaataacttcgtatagcatacattatacgaagttatggttaccgagctccaccttgctagttggatattacctcttctcttcaaagtatccttgaacgctcaccggttatcaaatctctacactatagctctgtagtcttgctagatagttagttctttagctctctctagaggttcacaaactcaatacaacacacagtggagtagggtattacgctccggcggcccgaaccactctaaatccttgtgtcctcgtgtgctcttccaccattaatgactgtaattgcagggacacgaagagttgtagcgcttttgccaacaagatccgctatatgctagtagagtggaacctgcacagcaacaagcatccaataatctgagaataagaattatgtgtggtgatggttctcatctctgcaactcgccattttcgcgagagaaccaaatccaagttggtgaagatcatgatttgggctcatgggctggcatagtagctattacctttgcaattgtggttcgaatctatccgatattctccttttcagggagagctaatgcttatgcttattgggtattttggtttgacactgcttcacgcccaaaaaaaggcaactatgtctgagttggatatggcccaaaaaaaggcagctatgtctgagttggatatggaagtcttctttcgtttagggtgaagtaagaccaagctcatgagcttattatcttaggtcggaacaaattagttgataggcatggcacatttatcaaattataatgattttaacagaaaagcaacacctctttttcagcagcaccagctttgcaagctgcaattgacactccaagcatagtatttgctccaaactcagcctgcatttcgcacaatatcatatctatttccatttggataaaatatattttccagaaatatgggaacagaatcaagatacagaaaaaagttgtggtagtagtggtaagtggaaacacaagtacagtgaaaagatagcattatttctgaacagtcaaattaaccgaaataagtagtatcacatactgcccctaaattgactacacccaatgtaaagaattgcttgagcatattgagccatcagttgtttgtttgtgtaacggatttgacaatgcagagttcaggagcaaaaaaccgcaaaggagagaaagagggaaaggatctcctagtatcccaccttgtggcgcgccctgtcaagtgcatgatggcctggtcgatctgcgtctgctgctgcggttccatcccaacgagtgcctccgacaccttgtcgttgatcacccgcaccgcgtaggcgacccccctggcgaggaacttccgcctctcggaggccccggccgcgtcggcggcggcgccctcgagcgcgcccacgctagccgtagatgctcggtgcacggccttgttggtgtgcaactcgacctcaacggccggtgcgctacgcccgtcaaggatctggcgcgcccgcaccctcgtgatcacggtgggcgcctcccgcctcatgtggccgacgatgaaaagcgccgggttaggggccttggcgcgcaccgccgtattcagggcctcctcgctcttgcgcgagagcaggtgcttccccaggtactcctgcactgacaaggctgccacagcggtggaatttgtcctcacgacttcgccacgtcgtcctcacctccctggcttcccacgactccgccgtatcgaggtgctcggtgggtcgtcttaatccgaagtccgaactaggaagacgagacagagaggtctgaggaatgggcctcgtttgatgttgagctgaattatttttccagcataagcccaggtcttggtccatgaacaaaattactagaaacccagcccagtactacgatctaaaagagggactgccactggatagctctctctagcattctccacgctccaatacagcggcgtcgtgtctatccgggtctatccgcgaacacgtgagaactctccagaaactgctttctcctccacttcatctctctcgctttccctctataaaaagaccccttctaggaattgagggagacagcaagcaccaagcagcgatccgaagctcaatcaattcactcaaacctcttccccaaatcttcgattagatcttcgttgacaagaagactagaaccgaacctgacatgtccaacctgctcacggttcaccagaaccttccggctcttccagtggacgcgacgtccgatgaagtcaggaagaacctcatggacatgttccgcgacaggcaagcgttcagcgagcacacctggaagatgctgctctccgtctgccgctcctgggctgcatggtgcaagctgaacaacaggaagtggttccccgctgagcccgaggacgtgagggattaccttctgtacctgcaagcgcgaggtttgtttctgcttctacctttgatatatatataataattatcattaattagtagtaatataatatttcaaatatttttttcaaaataaaagaatgtagtatatagcaattgcttttctgtagtttataagtgtgtatattttaatttataacttttctaatatatgaccaaaacatggtgatgcctaggtctggcagtgaagaccatccagcaacaccttggacaactgaacatgcttcacaggcgctccggcctcccgcgccccagcgactcgaacgccgtgagcctcgtcatgcgccgcatcaggaaggaaaacgtcgatgccggcgaaagggcaaagcaggccctcgcgttcgagaggaccgatttcgaccaggtccgcagcctgatggagaacagcgacaggtgccaggacattaggaacctggcgttcctcggaattgcatacaacacgctcctcaggatcgcggaaattgcccgcattcgcgtgaaggacattagccgcaccgacggcggcaggatgcttatccacattggcaggaccaagacgctcgtttccaccgcaggcgtcgaaaaggccctcagcctcggagtgaccaagctcgtcgaacgctggatctccgtgtccggcgtcgcggacgacccaaacaactacctcttctgccgcgtccgcaagaacggggtggctgcccctagcgccaccagccaactcagcacgagggccttggaaggtattttcgaggccacccaccgcctgatctacggcgcgaaggatgacagcggtcaacgctacctcgcatggtccgggcactccgcccgcgttggagctgctagggacatggcccgcgccggtgtttccatccccgaaatcatgcaggcgggtggatggacgaacgtgaacattgtcatgaactacattcgcaaccttgacagcgagacgggcgcaatggttcgcctcctggaagatggtgactgaggtacccaacctagacttgtccatcttctggattggccaacttaattaatgtatgaaataaaaggatgcacacatagtgacatgctaatcactataatgtgggcatcaaagttgtgtgttatgtgtaattactagttatctgaataaaagagaaagagatcatccatatttcttatcctaaatgaatgtcacgtgtctttataattctttgatgaaccagatgcatttcattaaccaaatccatatacatataaatattaatcatatataattaatatcaattgggttagcaaaacaaatctagtctaggtgtgttttgcgatccgatatcgatctccctcctttattatataaaagttaggtattacatcaggaccagtttagcaacgcgcacgggaaagggaaagcgcgtcagcggtcagcccaacccacgctgaggagggcctggttcgcggcccggatcggggggccctggccgaagcttacactgatagtttaaactgaaggcgggaaacgacaatctgatcatgagcggagaattaagggagtcacgttatgacccccgccgatgacgcgggacaagccgttttacgtttggaactgacagaaccgcaacgattgaaggagccactcagccgcgggtttctggagtttaatgagctaagcacatacgtcagaaaccattattgcgcgttcaaaagtcgcctaaggtcactatcagctagcaaatatttcttgtcaaaaatgctccactgacgttccataaattcccctcggtatccaattagagtctcatattcactcccatggcggccaatgcgggcggcggtggagcgggaggaggcagcggcagcggcagcgtggctgcgccggcggtgtgccgccccagcggctcgcggtggacgccgacgccggagcagatcaggatgctgaaggagctctactacggctgcggcatccggtcgcccagctcggagcagatccagcgcatcaccgccatgctgcggcagcacggcaagatcgagggcaagaacgtcttctactggttccagaaccacaaggcccgcgagcgccagaagcgccgcctcaccagcctcgacgtcaacgtgcccgccgccggcgcggccgacgccaccaccagccaactcggcgtcctctcgctgtcgtcgccgccgccttcaggcgcggcgcctccctcgcccaccctcggcttctacgccgccggcaatggcggcggatcggctgtgctgctggacacgagttccgactggggcagcagcggcgctgctatggccaccgagacatgcttcctgcaggactacatgggcgtgacggacacgggcagctcgtcgcagtggccacgcttctcgtcgtcggacacgataatggcggcggccgcggcgcgggcggcgacgacgcgggcgcccgagacgctccctctcttcccgacctgcggcgacgacggcggcagcggtagcagcagctacttgccgttctggggtgccgcgtccacaactgccggcgccacttcttccgttgcgatccaacagcaacaccagctgcaggagcagtacagcttttacagcaacagcaacagcacccagctggccggcaccggcaaccaagacgtatcggcaacagcagcagcagccgccgccctggagctgagcctcagctcatggtgctccccttaccctgctgcagggagtatgtgagatcaacgcgagctgccactgctcttcactgatgtctctggaatggaaggaggaggaagtgagaacagatcattcgacaaagcagcattagtccgttgatcggtggaagaccactcgtcagtgttgagttgaatgtttgatcaataaaatacggcaatgctgtaagggttgttttttatgccattgataatacactgtactgttcagttgttgaactctatttcttagccatgccaagtgcttttcttattttgaataacattacagcaaaaagttgaaagacaaaaaaaaaaacccccgaacagagtgctttgggtcccaagcttctttagactgtgttcggcgttccccctaaatttctccccctatatctcactcacttgtcacatcagcgttctctttccccctatatctccacgctctacagcagttccacctatatcaaacctctataccccaccacaacaatattatatactttcatcttcaactaactcatgtaccttccaatttttttctactaataattatttacgtgcacagaaacttagcaaggagagagagagcgggaatttaaatgctcggcgttaggcttttagtccgctaggtggctagaccgaggttaggacgctagttcactaggggcctagtggtgttttaagacgtcacggtcaccgcggccgcatcgagcagctggcttgtggggaccagacaaaaaaggaatggtgcagaattgttaggcgcacctaccaaaagcatctttgcctttattgcaaagataaagcagattcctctagtacaagtggggaacaaaataacgtggaaaagagctgtcctgacagcccactcactaatgcgtatgacgaacgcagtgacgaccacaaaactcgagcaacgagatcatgagccaatcaaagaggagtgatgtagacctaaagcaataatggagccatgacgtaagggcttacgcccatacgaaataattaaaggctgatgtgacctgtcggtctctcagaacctttactttttatgtttggcgtgtatttttaaatttccacggcaatgacgatgtgaccgtcgacccactaaaacattgctttgtcaaaagctaaaaaagatgatgcccgacagccacttgtgtgaagcatgagaagccggtccctccactaagaaaattagtgaagcatcttccagtggtccctccactcacagctcaatcagtgagcaacaggacgaaggaaatgacgtaagccatgacgtctaatcccattcgaaacgcgtggaccgaagcttgcatgcctgcagtgcagcgtgacccggtcgtgcccctctctagagataatgagcattgcatgtctaagttataaaaaattaccacatattttttttgtcacacttgtttgaagtgcagtttatctatctttatacatatatttaaactttactctacgaataatataatctatagtactacaataatatcagtgttttagagaatcatataaatgaacagttagacatggtctaaaggacaattgagtattttgacaacaggactctacagttttatctttttagtgtgcatgtgttctcctttttttttgcaaatagcttcacctatataatacttcatccattttattagtacatccatttagggtttagggttaatggtttttatagactaatttttttagtacatctattttattctattttagcctctaaattaagaaaactaaaactctattttagtttttttatttaataatttagatataaaatagaataaaataaagtgactaaaaattaaacaaataccctttaagaaattaaaaaaactaaggaaacatttttcttgtttcgagtagataatgccagcctgttaaacgccgtcgacgagtctaacggacaccaaccagcgaaccagcagcgtcgcgtcgggccaagcgaagcagacggcacggcatctctgtcgctgcctctggacccctctcgagagttccgctccaccgttggacttgctccgctgtcggcatccagaaattgcgtggcggagcggcagacgtgagccggcacggcaggcggcctcctcctcctctcacggcaccggcagctacgggggattcctttcccaccgctccttcgctttcccttcctcgcccgccgtaataaatagacaccccctccacaccctctttccccaacctcgtgttgttcggagcgcacacacacacaaccagatctcccccaaatccacccgtcggcacctccgcttcaaggtacgccgctcgtcctcccccccccccctctctaccttctctagatcggcgttccggtccatgcatggttagggcccggtagttctacttctgttcatgtttgtgttagatccgtgtttgtgttagatccgtgctgctagcgttcgtacacggatgcgacctgtacgtcagacacgttctgattgctaacttgccagtgtttctctttggggaatcctgggatggctctagccgttccgcagacgggatcgatttcatgattttttttgtttcgttgcatagggtttggtttgcccttttcctttatttcaatatatgccgtgcacttgtttgtcgggtcatcttttcatgcttttttttgtcttggttgtgatgatgtggtctggttgggcggtcgttctagatcggagtagaattctgtttcaaactacctggtggatttattaattttggatctgtatgtgtgtgccatacatattcatagttacgaattgaagatgatggatggaaatatcgatctaggataggtatacatgttgatgcgggttttactgatgcatatacagagatgctttttgttcgcttggttgtgatgatgtggtgtggttgggcggtcgttcattcgttctagatcggagtagaatactgtttcaaactacctggtgtatttattaattttggaactgtatgtgtgtgtcatacatcttcatagttacgagtttaagatggatggaaatatcgatctaggataggtatacatgttgatgtgggttttactgatgcatatacatgatggcatatgcagcatctattcatatgctctaaccttgagtacctatctattataataaacaagtatgttttataattattttgatcttgatatacttggatgatggcatatgcagcagctatatgtggatttttttagccctgccttcatacgctatttatttgcttggtactgtttcttttgtcgatgctcaccctgttgtttggtgttacttctgcaggtcgactttaacttagcctaggatccatggccactgtgaacaactggctcgctttctccctctccccgcaggagctgccgccctcccagacgacggactccacactcatctcggccgccaccgccgaccatgtctccggcgatgtctgcttcaacatcccccaagattggagcatgaggggatcagagctttcggcgctcgtcgcggagccgaagctggaggacttcctcggcggcatctccttctccgagcagcatcacaaggccaactgcaacatgatacccagcactagcagcacagtttgctacgcgagctcaggtgctagcaccggctaccatcaccagctgtaccaccagcccaccagctcagcgctccacttcgcggactccgtaatggtggcttcctcggccggtgtccacgacggcggtgccatgctcagcgcggccgccgctaacggtgtcgctggcgctgccagtgccaacggcggcggcatcgggctgtccatgattaagaactggctgcggagccaaccggcgcccatgcagccgagggtggcggcggctgagggcgcgcaggggctctctttgtccatgaacatggcggggacgacccaaggcgctgctggcatgccacttctcgctggagagcgcgcacgggcgcccgagagtgtatcgacgtcagcacagggtggagccgtcgtcgtcacggcgccgaaggaggatagcggtggcagcggtgttgccggcgctctagtagccgtgagcacggacacgggtggcagcggcggcgcgtcggctgacaacacggcaaggaagacggtggacacgttcgggcagcgcacgtcgatttaccgtggcgtgacaaggcatagatggactgggagatatgaggcacatctttgggataacagttgcagaagggaagggcaaactcgtaagggtcgtcaagtctatttaggtggctatgataaagaggagaaagctgctagggcttatgatcttgctgctctgaagtactggggtgccacaacaacaacaaattttccagtgagtaactacgaaaaggagctcgaggacatgaagcacatgacaaggcaggagtttgtagcgtctctgagaaggaagagcagtggtttctccagaggtgcatccatttacaggggagtgactaggcatcaccaacatggaagatggcaagcacggattggacgagttgcagggaacaaggatctttacttgggcaccttcagcacccaggaggaggcagcggaggcgtacgacatcgcggcgatcaagttccgcggcctcaacgccgtcaccaacttcgacatgagccgctacgacgtgaagagcatcctggacagcagcgccctccccatcggcagcgccgccaagcgcctcaaggaggccgaggccgcagcgtccgcgcagcaccaccacgccggcgtggtgagctacgacgtcggccgcatcgcctcgcagctcggcgacggcggagccctggcggcggcgtacggcgcgcactaccacggcgccgcctggccgaccatcgcgttccagccgggcgccgccagcacaggcctgtaccacccgtacgcgcagcagccaatgcgcggcggcgggtggtgcaagcaggagcaggaccacgcggtgatcgcggccgcgcacagcctgcaggacctccaccacctgaacctgggcgcggccggcgcgcacgactttttctcggcagggcagcaggccgccgccgctgcgatgcacggcctgggtagcatcgacagtgcgtcgctcgagcacagcaccggctccaactccgtcgtctacaacggcggggtcggcgacagcaacggcgccagcgccgtcggcggcagtggcggtggctacatgatgccgatgagcgctgccggagcaaccactacatcggcaatggtgagccacgagcaggtgcatgcacgggcctacgacgaagccaagcaggctgctcagatggggtacgagagctacctggtgaacgcggagaacaatggtggcggaaggatgtctgcatgggggactgtcgtgtctgcagccgcggcggcagcagcaagcagcaacgacaacatggccgccgacgtcgggcatggcggcgcgcagctcttcagtgtctggaacgacacttaagcgtacctagtggtacctgacatcttatagtctgcaacctctcgtgtctgaattcctatctttatcaagtgttattgcttccacgactataggacagctttcgtcgaaagcttttgctcatgtgatctcgaaggattcatctagtctgatttttcgtgacttgtatcggttttattggattcatccaacatatatcaataaaaaatgagttgtgtttcctttcttcctagttcagttaaaattatttccctcctgcgcttgtgctgtaattgtctgtgtacctgttgtttgtgactgtgttagttcccttggatatgatttcgtatttgatatgtacatggagatagcttagcttcattattggagtatgaagttagtatgacatagtcactctcctggaaaattgacactgcaaaccatatttttattctgaaccacaaatcctagtcagtccgctggcatatgccgtccgtttgctgaatccagaacgtgggtttggagatgtacggctgagatgcctctatgcgaaggggatttcgtggtgaaacgagatgggagtagagcaacgcccgtggaagatgcttcaaacttccacacttttgagcaacgatcggcagtagtaaggtagacgatttcaagatcaaagcatatgaagataaacaacatcaacaacaaaatttgttggggttctatagagagaaacagagctacatacatacactgttttgtatctaccatctgagatgatgaaaagatgaaaaactaaagaatgccccggcgccaacgccaggacacgccgcgcgcgcgtcacccgagccatctcttgacccagccggcgctgtatatttacacacgttgcagcatcgatcaccacctgttcgatcgcgtcgccgtcaccggcgcgccgcgacttattgaactagtctagggcgcggctaacaacctagcttagattgccttgtctaaacccttaggctaacgcgccactctagacgtgcgcacgataacttcgtatagcatacattatacgaagttataacagcggaccgggttaccgaattcctgcccttaaggccaattgttcaagattcattcaacaattgaaacatctcccatgattaaatcagtataaggttgctatggtcttgcttgacaaagtttttttttgagggaatttcaactaaatttttgagtgaaactatcaaatactgattttaaaaaatttttataaaaggaagcgcagagataaaaggccatctatgctacaaaagtacccaaaaatgtaatcctaaagtatgaattgcattttttttttgtttggacgaaaggaaaggagtattaccacaagaatgatatcatcttcatatttagatcttttttgggtaaagcttgagattctctaaatatagagaaatcagaagaaaaaaaaaccgtgttttggtggttttgatttctagcctccacaataactttgacggcgtcgacaagtctaacggacaccaagcagcgaaccaccagcgccgagccaagcgaagcagacggccgagacgttgacaccttcggcgcggcatctctcgagagttccgctccggcgctccacctccaccgctggcggtttcttattccgttccgttccgcctcctgctctgctcctctccacaccacacggcacgaaaccgttacggcaccggcagcacccagcacgggagaggggattcctttcccaccgttccttccctttccgccccgccgctataaatagccagccccatccccagcttttttccccaatctcatctcctctctcctgttgttcggagcacacgcacaatccgatcgatccccaaatccccttcgtctctcctcgcgagcctcgtggatcccagcttcaaggtacggcgatcgatcatcccccctccttctctctaccttcttttctctagactacatcggatggcgatccatggttagggcctgctagtttcccttcctgttttgtcgatggctgcgaggcacaatagatctgatggcgttatgacggctaacttgtcatgttgttgcgatttatagtccctttaggagatcagtttaatttctcggatggttcgagatcggtggtccatggttagtaccctaagatccgcgctgttagggttcgtagatggaggcgacctgttctgattgttaacttgtcagtacctgggaaatcctgggatggttctagctcgtccgcagatgagatcgatttcatgatcctctgtatcttgtttcgttgcctaggttccgtctaatctatccgtggtatgatgtagatgttttgatcgtgctaactacgtcttgtaaagttaattgtcaggtcataatttttagcatgcctttttttttgtttggttttgtctaattgggctgtcgttctagatcagagtagaagactgttccaaactacctgctggatttattgaacttggatctgtatgtgtgtcacatatcttcataaattcatgattaagatggattgaaatatcttttatctttttggtatggatagttctatatgttggtgtggctttgttagatgtatacatgcttagatacatgaagcaacgtgctgctactgtttagtaattgctgttcatttgtctaataaacagataaggatatgtatttatgttgctgttggttttgctggtactttgttggatacaaatgcttcaatacagaaaacagcatgctgctacgatttaccatttatctaatcttatcatatgtctaatctaataaacaaacatgcttttaaattatcttcatatgcttggatgatggcatacacagcggctatgtgtggttttttaaatacccagcatcatgggcatgcatgacactgctttaatatgctttttatttgcttgagactgtttcttttgtttatactgaccctttagttcggtgactcttctgcaggtcgactttaacttagcctaggatccatggcccagtccaagcacggcctgaccaaggagatgaccatgaagtaccgcatggagggctgcgtggacggccacaagttcgtgatcaccggcgagggcatcggctaccccttcaagggcaagcaggccatcaacctgtgcgtggtggagggcggccccttgcccttcgccgaggacatcttgtccgccgccttcatgtacggcaaccgcgtgttcaccgagtacccccaggacatcgtcgactacttcaagaactcctgccccgccggctacacctgggaccgctccttcctgttcgaggacggcgccgtgtgcatctgcaacgccgacatcaccgtgagcgtggaggagaactgcatgtaccacgagtccaagttctacggcgtgaacttccccgccgacggccccgtgatgaagaagatgaccgacaactgggagccctcctgcgagaagatcatccccgtgcccaagcagggcatcttgaagggcgacgtgagcatgtacctgctgctgaaggacggtggccgcttgcgctgccagttcgacaccgtgtacaaggccaagtccgtgccccgcaagatgcccgactggcacttcatccagcacaagctgacccgcgaggaccgcagcgacgccaagaaccagaagtggcacctgaccgagcacgccatcgcctccggctccgccttgccctccggactcagatctcgatagggtaccaatggccagttaacagatccagctgctgctgttctagggttcacaagtctgcctatttgtcttccccaatggagctatggttgtctggtctggtccttggtcgtgtcccgtttcattgtgtactatttacctgtaatgtgtatccttaagtctggtttgatggtgtctgaaacgttttgctgtggtagagcagcatggaagaactataatgaataagtgatccctaatcattgtgtccaaattttgcttctgctatacccttttgtgctgtttcttatgttttgcttaaaaatttgatctgacaaacaaatttgtctaaattatgctcttgttctgactgtgtactgtacacatttgtattgctaccggtttggcacatagttttctctttgattgcagatcaaacccttctgattgcagattgcttggctatggctgatgtgctcactgttcttctttagcttgtatattgctgatggtggcttggctacggctgaaaaagttgctgctgcgccgacttggcaactgttgctccagtaatgctttgtcctctcttcctagccgccgacttggcacttggcagctgttgctcctgtaatgcgttgttatctcttatctcttgagatgtactatgattttgaggctgtttgacttgtgccagattgccagtgctgatgctatattatctcaggtttttatgctagtatatgttttactgtgtgctgcctgtgtcgagttacgtaatctattgaaccgctatgcgtgttgatgccctgttgttgcttgccagattgatgcccctgttgcttgcagcttgcaagctgtagtgaaatcctaaaattcgaaaccaaatctattctgaacttttgaagatctgtgatgtccggaagaaaagattcaaacagataaacgggactctccagaatctataaaataaatgatcgacaaacgctttgctttggtaggcttcctagttagttagcggaccgaagcttcggtccgggcctagaaggccagcttcggccgcccctcggtaccctgggatctgcccttactttaacgcctctaaccaacacccctttatctttataaggaacaataaacagaatttgccccactgttctaaatcacctaataatatccccagctaaaaacaataaaggtttcctagaattaagacaagcatgactgttcctccaggagggtttggaacattgttgcagtcttgcagatacgggcgaagggtgagaaacagagcggagggctggaggtgacctcggtagtcgacgccggagttgagcttgacaacgacggggcggcccctgatggacttgaggaagtccgatggcgtcttcaccgtcccgccggcgcccgaggcgggcctgtcgctgccgccgccgccgctgctcatcttgcgcgctgtgcccccggcggtgtccctgtgttgcggatcgcgggtgggccaggtggatgcgagggcgacccgtttggactccggccggagccgccggatccctggtcggtgtcagtgccgtttactctgggccccacgtgtcagtaccgtctgtagatgacaacaacccgtcgtccacagtcatgtccaaaatatcctttcttcttttttttcgattcggatatctatcttccttttttttttccaaaaatcttcttgacgcaccagcgcgcacgtttgtggtaaacgccgacacgtcggtcccacgtcgatagaccccacccaccagtgagtagcgtgtacgtattcgggggtgacggacgtgtcgccgtcgtcttgctagtcccattcccatctgagccacacatctctgaacaaaaaaaaggagggaggcctccacgcacatccccctccgtgccacccgccccaaaccctcgcgccgcctccgagacagccgccgcaaccatggccaccgccgccgccgcgtctaccgcgctcactggcgccactaccgctgcgcccaaggcgaggcgccgggcgcacctcctggccacccgccgcgccctcgccgcgcccatcaggtgctcagcggcgtcacccgccatgccgatggctcccccggccaccccgctccggccgtggggccccaccgagccccgcaagggtgctgacatcctcgtcgagtccctcgagcgctgcggcgtccgcgacgtcttcgcctaccccggcggcgcgtccatggagatccaccaggcactcacccgctcccccgtcatcgccaaccacctcttccgccacgagcaaggggaggcctttgccgcctccggctacgcgcgctcctcgggccgcgtcggcgtctgcatcgccacctccggccccggcgccaccaacctagtctccgcgctcgccgacgcgctgctcgattccgtccccatggtcgccatcacgggacaggtggcgcgacgcatgattggcaccgacgccttccaggagacgcccatcgtcgaggtcacccgctccatcaccaagcacaactacctggtcctcgacgtcgacgacatcccccgcgtcgtgcaggaggctttcttcctcgcctcctctggtcgaccagggccggtgcttgtcgacatccccaaggacatccagcagcagatggcggtgcctgtctgggacaagcccatgagtctgcctgggtacattgcgcgccttcccaagccccctgcgactgagttgcttgagcaggtgctgcgtcttgttggtgaatcgcggcgccctgttctttatgtgggcggtggctgcgcagcatctggtgaggagttgcgacgctttgtggagctgactggaatcccggtcacaactactcttatgggcctcggcaacttccccagcgacgacccactgtctctgcgcatgctaggtatgcatgggacggtgtatgcaaattatgcagtggataaggccgatctgttgcttgcacttggtgtgcggtttgatgatcgcgtgacagggaagattgaggcttttgcaagcagggctaagattgtgcacgttgatattgatccggctgagattggcaagaacaagcagccacatgtgtccatctgtgcagatgttaagcttgctttgcagggcatgaatgctcttcttgaaggaagcacatcaaagaagagctttgactttggctcatggaacgatgagttggatcagcagaagagggaattcccccttgggtataaaacatctaatgaggagatccagccacaatatgctattcaggttcttgatgagctgacgaaaggcgaggccatcatcggcacaggtgttgggcagcaccagatgtgggcggcacagtactacacttacaagcggccaaggcagtggttgtcttcagctggtcttggggctatgggatttggtttgccggctgctgctggtgcttctgtggcaaacccaggtgtcactgttgttgacatcgatggagatggtagctttctcatgaacgttcaggagctagctatgatccgaattgagaacctcccagtgaaggtctttgtgctaaacaaccagcacctggggatggtggtgcagttggaggacaggttctataaggccaacagagcgcacacatacttgggaaacccagagaatgaaagtgagatatatccagatttcgtgacgatcgccaaagggttcaacattccagccgtccgtgtgacaaagaagaacgaagtccgcgcagcgataaagaagatgctcgagactccagggccgtacctcttggatataatcgtcccacaccaggagcatgtgttgcctatgatccctagtggtggggctttcaaggatatgatcctggatggtgatggcaggactgtgtactgacttcgaataggtacccggggatcctctagtgccgtgggtcgtttaagctgccgctgtacctgtgtcgtctggtgccttctggtgtacctgggaggttgtcgtctatcaagtatctgtggttggtgtcatgagtcagtgagtcccaatactgttcgtgtcctgtgtgcattatacccaaaactgttatgggcaaatcatgaataagcttgatgttcgaacttaaaagtctctgctcaatatggtattatggttgtttttgttcgtctcctaatatttgcctgggatcaaattttattggctggtgttcatttgacctccatgttcttgctaggctccattttttactctacagccataatatgtttgattgtttggtttgttctttgttgtacacctggttctgtcgagcttagttttcgacactggcttacagcttaacatgttgctattttattgggttctgattgctattttattgggttctgattgctagtttttgctgaatccaaaaaccatgttatttatttaagcgatccaggttattattatgatggtggctaagtttttttttttccaagggtaaattttctggattctccagtgtttctgtggccgaattcaatcactagagtcgacctgcaaagcttcggtccgggcctagaaggcccgcgccacttacgcttgattccgatgacttcgtaggttcctagctcaagccgctcgtgtccaagcgtcacttacgattagctaatgattacggcatctaggaccgactagttcttatgtgcttctagtctccaaatgtggttgatagttattttgctctaagatcaacagtaatgaagtataaatcatcgttgtggtgtgctactcggttaattgagcattaacacacacaaacatgacgaggatggtataatctccaaaaatgtgtactttgttaggtgggaccctatagccttgattaatgtgctatgttaggcatgcctggaaacgtgtgacgcatatgttttgtgaacctgttgatattatatgtgcttttatattaccatattttattaaaatactaatatttattactagtaagatataacattctatctagcttaaaaactaaccataaatattccataataactagatttaccaaactaatatactaaatatacataataaatacaaaattaacaagacaataatcaatatttatgagcttaatatatttagacattatggttggtcgacgataatcatgctaacttttcgtaattgcttgattgaaatatgcttagaataatgcctctttgttctacatggcaaatagggaccattatggtgtaacaccctgggaaccacaaacaccccgaaatgctactaaactacacaactaaccttcatatataaaatttcgacagcatctcctttgaaaatttgcatagacgtggaagcaacagagtataaacagatctgcgtttaaacgtgcaagcgctactagacaattcagtacattaaaaacgtccgcaatgtgttattaagttgtctaagcgtcaatttgtttacaccacaatatatcctgcca

SEQ ID NO: 150 - DNA, 20836 bp, unidentified
  source 1..20836: mol_type = other DNA; note = Artificial
gtttacccgccaatatatcctgtcaaacactgcggccgcacttgaccgcggatggagccggagctgtggtgaggccatcgacgggaggtgggggagaacacagtctcagtgttctttgtgagtccgcaaggtttttagcttttctgtattaattaaggttgctgttggctgtagaatacggtcgtggaagagctgtatcggtagctactacgtaagctattatatactggaagtctggagctcgtcgatctccggtcgtcttcctccatttctcctcgtcttgctttgactgctgctaccatttgcttctgttttctgatgaagcatgccatgtcggccaccagtgtttgtgtggtttttgcagggaatggctttcaagtgctgtgattgaatggccctcgtcgtcctcggctgagctcacatggacgcgtcatgtgagtgagatatatgatcatatgatgagtggggttcgggtgagtgcgtacttgaagtaggatcccgctttcactcattcattcattggcctttaaaccgggaaattttcgcgaggagatggagggaagcaagcagggtgacgagtgcagagtgccgcgagcgctttgtcaaaaggcaccgccgtaggcaaaaaaatcaatggccctgactgactcgatggtagtactactgtagagactagagagggttgctccccatatcttcgtgtgacttttactccagcattgcatttccgtcattgagacgttaattaatagcagctttcgggacagatgactgtggccatgtttcgtcacggccgcttcgtgccagctgggggtactatagtactgtgattttgttagtaaaaactttcattaggccaccattgacgaccgggccttcgcttttgctgcgctaattaaccatttcccggcgaccgaagggaacatgaacatgccccgacacatgagggcatgaggactagtgttctccctgtcgttcgttgacttgactagtgatagtttaaacgctcttcaactggaagagcggttactaccggttcactagctagctgctaatcgagctagttaccctatgaggtgacatgaagcgctcacggttactatgacggttagcttcacgactgttggtggcagtagcgtacgacttagctatagttccggacttacctagctaataacttcgtatagcatacattatacgaagttatggttaccgagctccaccttgctagttggatattacctcttctcttcaaagtatccttgaacgctcaccggttatcaaatctctacactatagctctgtagtcttgctagatagttagttctttagctctctctagaggttcacaaactcaatacaacacacagtggagtagggtattacgctccggcggcccgaaccactctaaatccttgtgtcctcgtgtgctcttccaccattaatgactgtaattgcagggacacgaagagttgtagcgcttttgccaacaagatccgctatatgctagtagagtggaacctgcacagcaacaagcatccaataatctgagaataagaattatgtgtggtgatggttctcatctctgcaactcgccattttcgcgagagaaccaaatccaagttggtgaagatcatgatttgggctcatgggctggcatagtagctattacctttgcaattgtggttcgaatctatccgatattctccttttcagggagagctaatgcttatgcttattgggtattttggtttgacactgcttcacgcccaaaaaaaggcaactatgtctgagttggatatggcccaaaaaaaggcagctatgtctgagttggatatggaagtcttctttcgtttagggtgaagtaagaccaagctcatgagcttattatcttaggtcggaacaaattagttgataggcatggcacatttatcaaattataatgattttaacagaaaagcaacacctctttttcagcagcaccagctttgcaagctgcaattgacactccaagcatagtatttgctccaaactcagcctgcatttcgcacaatatcatatctatttccatttggataaaatatattttccagaaatatgggaacagaatcaagatacagaaaaaagttgtggtagtagtggtaagtggaaacacaagtacagtgaaaagatagcattatttctgaacagtcaaattaaccgaaataagtagtatcacatactgcccctaaattgactacacccaatgtaaagaattgcttgagcatattgagccatcagttgtttgtttgtgtaacggatttgacaatgcagagttcaggagcaaaaaaccgcaaaggagagaaagagggaaaggatctcctagtatcccaccttgtggcgcgccctgtcaagtgcatgatggcctggtcgatctgcgtctgctgctgcggttccatcccaacgagtgcctccgacaccttgtcgttgatcacccgcaccgcgtaggcgacccccctggcgaggaacttccgcctctcggaggccccggccgcgtcggcggcggcgccctcgagcgcgcccacgctagccgtagatgctcggtgcacggccttgttggtgtgcaactcgacctcaacggccggtgcgctacgcccgtcaaggatctggcgcgcccgcaccctcgtgatcacggtgggcgcctcccgcctcatgtggccgacgatgaaaagcgccgggttaggggccttggcgcgcaccgccgtattcagggcctcctcgctcttgcgcgagagcaggtgcttccccaggtactcctgcactgacaaggctgccacagcggtggaatttgtcctcacgacttcgccacgtcgtcctcacctccctggcttcccacgactccgccgtatcgaggtgctcggtgggtcgtcttaatccgaagtccgaactaggaagacgagacagagaggtctgaggaatgggcctcgtttgatgttgagctgaattatttttccagcataagcccaggtcttggtccatgaacaaaattactagaaacccagcccagtactacgatctaaaagagggactgccactggatagctctctctagcattctccacgctccaatacagcggcgtcgtgtctatccgggtctatccgcgaacacgtgagaactctccagaaactgctttctcctccacttcatctctctcgctttccctctataaaaagaccccttctaggaattgagggagacagcaagcaccaagcagcgatccgaagctcaatcaattcactcaaacctcttccccaaatcttcgattagatcttcgttgacaagaagactagaaccgaacctgacatgtccaacctgctcacggttcaccagaaccttccggctcttccagtggacgcgacgtccgatgaagtcaggaagaacctcatggacatgttccgcgacaggcaagcgttcagcgagcacacctggaagatgctgctctccgtctgccgctcctgggctgcatggtgcaagctgaacaacaggaagtggttccccgctgagcccgaggacgtgagggattaccttctgtacctgcaagcgcgaggtttgtttctgcttctacctttgatatatatataataattatcattaattagtagtaatataatatttcaaatatttttttcaaaataaaagaatgtagtatatagcaattgcttttctgtagtttataagtgtgtatattttaatttataacttttctaatatatgaccaaaacatggtgatgcctaggtctggcagtgaagaccatccagcaacaccttggacaactgaacatgcttcacaggcgctccggcctcccgcgccccagcgactcgaacgccgtgagcctcgtcatgcgccgcatcaggaaggaaaacgtcgatgccggcgaaagggcaaagcaggccctcgcgttcgagaggaccgatttcgaccaggtccgcagcctgatggagaacagcgacaggtgccaggacattaggaacctggcgttcctcggaattgcatacaacacgctcctcaggatcgcggaaattgcccgcattcgcgtgaaggacattagccgcaccgacggcggcaggatgcttatccacattggcaggaccaagacgctcgtttccaccgcaggcgtcgaaaaggccctcagcctcggagtgaccaagctcgtcgaacgctggatctccgtgtccggcgtcgcggacgacccaaacaactacctcttctgccgcgtccgcaagaacggggtggctgcccctagcgccaccagccaactcagcacgagggccttggaaggtattttcgaggccacccaccgcctgatctacggcgcgaaggatgacagcggtcaacgctacctcgcatggtccgggcactccgcccgcgttggagctgctagggacatggcccgcgccggtgtttccatccccgaaatcatgcaggcgggtggatggacgaacgtgaacattgtcatgaactacattcgcaaccttgacagcgagacgggcgcaatggttcgcctcctggaagatggtgactgaggtacccaacctagacttgtccatcttctggattggccaacttaattaatgtatgaaataaaaggatgcacacatagtgacatgctaatcactataatgtgggcatcaaagttgtgtgttatgtgtaattactagttatctgaataaaagagaaagagatcatccatatttcttatcctaaatgaatgtcacgtgtctttataattctttgatgaaccagatgcatttcattaaccaaatccatatacatataaatattaatcatatataattaatatcaattgggttagcaaaacaaatctagtctaggtgtgttttgcgatccgatatcgatcctcgtggttgtgctcagtgctctgctcactacggaatgctgtgcactactgttcctgatgtgagacatggtgtcaatgatctctcttgactttagcaatttgtttttttttttgggccctggccgaagcttacactgatagtttaaactgaaggcgggaaacgacaatctgatcatgagcggagaattaagggagtcacgttatgacccccgccgatgacgcgggacaagccgttttacgtttggaactgacagaaccgcaacgattgaaggagccactcagccgcgggtttctggagtttaatgagctaagcacatacgtcagaaaccattattgcgcgttcaaaagtcgcctaaggtcactatcagctagcaaatatttcttgtcaaaaatgctccactgacgttccataaattcccctcggtatccaattagagtctcatattcactcccatggcggccaatgcgggcggcggtggagcgggaggaggcagcggcagcggcagcgtggctgcgccggcggtgtgccgccccagcggctcgcggtggacgccgacgccggagcagatcaggatgctgaaggagctctactacggctgcggcatccggtcgcccagctcggagcagatccagcgcatcaccgccatgctgcggcagcacggcaagatcgagggcaagaacgtcttctactggttccagaaccacaaggcccgcgagcgccagaagcgccgcctcaccagcctcgacgtcaacgtgcccgccgccggcgcggccgacgccaccaccagccaactcggcgtcctctcgctgtcgtcgccgccgccttcaggcgcggcgcctccctcgcccaccctcggcttctacgccgccggcaatggcggcggatcggctgtgctgctggacacgagttccgactggggcagcagcggcgctgctatggccaccgagacatgcttcctgcaggactacatgggcgtgacggacacgggcagctcgtcgcagtggccacgcttctcgtcgtcggacacgataatggcggcggccgcggcgcgggcggcgacgacgcgggcgcccgagacgctccctctcttcccgacctgcggcgacgacggcggcagcggtagcagcagctacttgccgttctggggtgccgcgtccacaactgccggcgccacttcttccgttgcgatccaacagcaacaccagctgcaggagcagtacagcttttacagcaacagcaacagcacccagctggccggcaccggcaaccaagacgtatcggcaacagcagcagcagccgccgccctggagctgagcctcagctcatggtgctccccttaccctgctgcagggagtatgtgagatcaacgcgagctgccactgctcttcactgatgtctctggaatggaaggaggaggaagtgagaacagatcattcgacaaagcagcattagtccgttgatcggtggaagaccactcgtcagtgttgagttgaatgtttgatcaataaaatacggcaatgctgtaagggttgttttttatgccattgataatacactgtactgttcagttgttgaactctatttcttagccatgccaagtgcttttcttattttgaataacattacagcaaaaagttgaaagacaaaaaaaaaaacccccgaacagagtgctttgggtcccaagcttctttagactgtgttcggcgttccccctaaatttctccccctatatctcactcacttgtcacatcagcgttctctttccccctatatctccacgctctacagcagttccacctatatcaaacctctataccccaccacaacaatattatatactttcatcttcaactaactcatgtaccttccaatttttttctactaataattatttacgtgcacagaaacttagcaaggagagagagagcgggaatttaaatgctcggcgttaggcttttagtccgctaggtggctagaccgaggttaggacgctagttcactaggggcctagtggtgttttaagacgtcacggtcaccgcggccgcatcgagcagctggcttgtggggaccagacaaaaaaggaatggtgcagaattgttaggcgcacctaccaaaagcatctttgcctttattgcaaagataaagcagattcctctagtacaagtggggaacaaaataacgtggaaaagagctgtcctgacagcccactcactaatgcgtatgacgaacgcagtgacgaccacaaaactcgagcaacgagatcatgagccaatcaaagaggagtgatgtagacctaaagcaataatggagccatgacgtaagggcttacgcccatacgaaataattaaaggctgatgtgacctgtcggtctctcagaacctttactttttatgtttggcgtgtatttttaaatttccacggcaatgacgatgtgaccgtcgacccactaaaacattgctttgtcaaaagctaaaaaagatgatgcccgacagccacttgtgtgaagcatgagaagccggtccctccactaagaaaattagtgaagcatcttccagtggtccctccactcacagctcaatcagtgagcaacaggacgaaggaaatgacgtaagccatgacgtctaatcccattcgaaacgcgtggaccgaagcttgcatgcctgcagtgcagcgtgacccggtcgtgcccctctctagagataatgagcattgcatgtctaagttataaaaaattaccacatattttttttgtcacacttgtttgaagtgcagtttatctatctttatacatatatttaaactttactctacgaataatataatctatagtactacaataatatcagtgttttagagaatcatataaatgaacagttagacatggtctaaaggacaattgagtattttgacaacaggactctacagttttatctttttagtgtgcatgtgttctcctttttttttgcaaatagcttcacctatataatacttcatccattttattagtacatccatttagggtttagggttaatggtttttatagactaatttttttagtacatctattttattctattttagcctctaaattaagaaaactaaaactctattttagtttttttatttaataatttagatataaaatagaataaaataaagtgactaaaaattaaacaaataccctttaagaaattaaaaaaactaaggaaacatttttcttgtttcgagtagataatgccagcctgttaaacgccgtcgacgagtctaacggacaccaaccagcgaaccagcagcgtcgcgtcgggccaagcgaagcagacggcacggcatctctgtcgctgcctctggacccctctcgagagttccgctccaccgttggacttgctccgctgtcggcatccagaaattgcgtggcggagcggcagacgtgagccggcacggcaggcggcctcctcctcctctcacggcaccggcagctacgggggattcctttcccaccgctccttcgctttcccttcctcgcccgccgtaataaatagacaccccctccacaccctctttccccaacctcgtgttgttcggagcgcacacacacacaaccagatctcccccaaatccacccgtcggcacctccgcttcaaggtacgccgctcgtcctcccccccccccctctctaccttctctagatcggcgttccggtccatgcatggttagggcccggtagttctacttctgttcatgtttgtgttagatccgtgtttgtgttagatccgtgctgctagcgttcgtacacggatgcgacctgtacgtcagacacgttctgattgctaacttgccagtgtttctctttggggaatcctgggatggctctagccgttccgcagacgggatcgatttcatgattttttttgtttcgttgcatagggtttggtttgcccttttcctttatttcaatatatgccgtgcacttgtttgtcgggtcatcttttcatgcttttttttgtcttggttgtgatgatgtggtctggttgggcggtcgttctagatcggagtagaattctgtttcaaactacctggtggatttattaattttggatctgtatgtgtgtgccatacatattcatagttacgaattgaagatgatggatggaaatatcgatctaggataggtatacatgttgatgcgggttttactgatgcatatacagagatgctttttgttcgcttggttgtgatgatgtggtgtggttgggcggtcgttcattcgttctagatcggagtagaatactgtttcaaactacctggtgtatttattaattttggaactgtatgtgtgtgtcatacatcttcatagttacgagtttaagatggatggaaatatcgatctaggataggtatacatgttgatgtgggttttactgatgcatatacatgatggcatatgcagcatctattcatatgctctaaccttgagtacctatctattataataaacaagtatgttttataattattttgatcttgatatacttggatgatggcatatgcagcagctatatgtggatttttttagccctgccttcatacgctatttatttgcttggtactgtttcttttgtcgatgctcaccctgttgtttggtgttacttctgcaggtcgactttaacttagcctaggatccatggccactgtgaacaactggctcgctttctccctctccccgcaggagctgccgccctcccagacgacggactccacactcatctcggccgccaccgccgaccatgtctccggcgatgtctgcttcaacatcccccaagattggagcatgaggggatcagagctttcggcgctcgtcgcggagccgaagctggaggacttcctcggcggcatctccttctccgagcagcatcacaaggccaactgcaacatgatacccagcactagcagcacagtttgctacgcgagctcaggtgctagcaccggctaccatcaccagctgtaccaccagcccaccagctcagcgctccacttcgcggactccgtaatggtggcttcctcggccggtgtccacgacggcggtgccatgctcagcgcggccgccgctaacggtgtcgctggcgctgccagtgccaacggcggcggcatcgggctgtccatgattaagaactggctgcggagccaaccggcgcccatgcagccgagggtggcggcggctgagggcgcgcaggggctctctttgtccatgaacatggcggggacgacccaaggcgctgctggcatgccacttctcgctggagagcgcgcacgggcgcccgagagtgtatcgacgtcagcacagggtggagccgtcgtcgtcacggcgccgaaggaggatagcggtggcagcggtgttgccggcgctctagtagccgtgagcacggacacgggtggcagcggcggcgcgtcggctgacaacacggcaaggaagacggtggacacgttcgggcagcgcacgtcgatttaccgtggcgtgacaaggcatagatggactgggagatatgaggcacatctttgggataacagttgcagaagggaagggcaaactcgtaagggtcgtcaagtctatttaggtggctatgataaagaggagaaagctgctagggcttatgatcttgctgctctgaagtactggggtgccacaacaacaacaaattttccagtgagtaactacgaaaaggagctcgaggacatgaagcacatgacaaggcaggagtttgtagcgtctctgagaaggaagagcagtggtttctccagaggtgcatccatttacaggggagtgactaggcatcaccaacatggaagatggcaagcacggattggacgagttgcagggaacaaggatctttacttgggcaccttcagcacccaggaggaggcagcggaggcgtacgacatcgcggcgatcaagttccgcggcctcaacgccgtcaccaacttcgacatgagccgctacgacgtgaagagcatcctggacagcagcgccctccccatcggcagcgccgccaagcgcctcaaggaggccgaggccgcagcgtccgcgcagcaccaccacgccggcgtggtgagctacgacgtcggccgcatcgcctcgcagctcggcgacggcggagccctggcggcggcgtacggcgcgcactaccacggcgccgcctggccgaccatcgcgttccagccgggcgccgccagcacaggcctgtaccacccgtacgcgcagcagccaatgcgcggcggcgggtggtgcaagcaggagcaggaccacgcggtgatcgcggccgcgcacagcctgcaggacctccaccacctgaacctgggcgcggccggcgcgcacgactttttctcggcagggcagcaggccgccgccgctgcgatgcacggcctgggtagcatcgacagtgcgtcgctcgagcacagcaccggctccaactccgtcgtctacaacggcggggtcggcgacagcaacggcgccagcgccgtcggcggcagtggcggtggctacatgatgccgatgagcgctgccggagcaaccactacatcggcaatggtgagccacgagcaggtgcatgcacgggcctacgacgaagccaagcaggctgctcagatggggtacgagagctacctggtgaacgcggagaacaatggtggcggaaggatgtctgcatgggggactgtcgtgtctgcagccgcggcggcagcagcaagcagcaacgacaacatggccgccgacgtcgggcatggcggcgcgcagctcttcagtgtctggaacgacacttaagcgtacctagtggtacctgacatcttatagtctgcaacctctcgtgtctgaattcctatctttatcaagtgttattgcttccacgactataggacagctttcgtcgaaagcttttgctcatgtgatctcgaaggattcatctagtctgatttttcgtgacttgtatcggttttattggattcatccaacatatatcaataaaaaatgagttgtgtttcctttcttcctagttcagttaaaattatttccctcctgcgcttgtgctgtaattgtctgtgtacctgttgtttgtgactgtgttagttcccttggatatgatttcgtatttgatatgtacatggagatagcttagcttcattattggagtatgaagttagtatgacatagtcactctcctggaaaattgacactgcaaaccatatttttattctgaaccacaaatcctagtcagtccgctggcatatgccgtccgtttgctgaatccagaacgtgggtttggagatgtacggctgagatgcctctatgcgaaggggatttcgtggtgaaacgagatgggagtagagcaacgcccgtggaagatgcttcaaacttccacacttttgagcaacgatcggcagtagtaaggtagacgatttcaagatcaaagcatatgaagataaacaacatcaacaacaaaatttgttggggttctatagagagaaacagagctacatacatacactgttttgtatctaccatctgagatgatgaaaagatgaaaaactaaagaatgccccggcgccaacgccaggacacgccgcgcgcgcgtcacccgagccatctcttgacccagccggcgctgtatatttacacacgttgcagcatcgatcaccacctgttcgatcgcgtcgccgtcaccggcgcgccgcgacttattgaactagtctagggcgcggctaacaacctagcttagattgccttgtctaaacccttaggctaacgcgccactctagacgtgcgcacgataacttcgtatagcatacattatacgaagttataacagcggaccgggttaccgaattcctgcccttaaggccaattgttcaagattcattcaacaattgaaacatctcccatgattaaatcagtataaggttgctatggtcttgcttgacaaagtttttttttgagggaatttcaactaaatttttgagtgaaactatcaaatactgattttaaaaaatttttataaaaggaagcgcagagataaaaggccatctatgctacaaaagtacccaaaaatgtaatcctaaagtatgaattgcattttttttttgtttggacgaaaggaaaggagtattaccacaagaatgatatcatcttcatatttagatcttttttgggtaaagcttgagattctctaaatatagagaaatcagaagaaaaaaaaaccgtgttttggtggttttgatttctagcctccacaataactttgacggcgtcgacaagtctaacggacaccaagcagcgaaccaccagcgccgagccaagcgaagcagacggccgagacgttgacaccttcggcgcggcatctctcgagagttccgctccggcgctccacctccaccgctggcggtttcttattccgttccgttccgcctcctgctctgctcctctccacaccacacggcacgaaaccgttacggcaccggcagcacccagcacgggagaggggattcctttcccaccgttccttccctttccgccccgccgctataaatagccagccccatccccagcttttttccccaatctcatctcctctctcctgttgttcggagcacacgcacaatccgatcgatccccaaatccccttcgtctctcctcgcgagcctcgtggatcccagcttcaaggtacggcgatcgatcatcccccctccttctctctaccttcttttctctagactacatcggatggcgatccatggttagggcctgctagtttcccttcctgttttgtcgatggctgcgaggcacaatagatctgatggcgttatgacggctaacttgtcatgttgttgcgatttatagtccctttaggagatcagtttaatttctcggatggttcgagatcggtggtccatggttagtaccctaagatccgcgctgttagggttcgtagatggaggcgacctgttctgattgttaacttgtcagtacctgggaaatcctgggatggttctagctcgtccgcagatgagatcgatttcatgatcctctgtatcttgtttcgttgcctaggttccgtctaatctatccgtggtatgatgtagatgttttgatcgtgctaactacgtcttgtaaagttaattgtcaggtcataatttttagcatgcctttttttttgtttggttttgtctaattgggctgtcgttctagatcagagtagaagactgttccaaactacctgctggatttattgaacttggatctgtatgtgtgtcacatatcttcataaattcatgattaagatggattgaaatatcttttatctttttggtatggatagttctatatgttggtgtggctttgttagatgtatacatgcttagatacatgaagcaacgtgctgctactgtttagtaattgctgttcatttgtctaataaacagataaggatatgtatttatgttgctgttggttttgctggtactttgttggatacaaatgcttcaatacagaaaacagcatgctgctacgatttaccatttatctaatcttatcatatgtctaatctaataaacaaacatgcttttaaattatcttcatatgcttggatgatggcatacacagcggctatgtgtggttttttaaatacccagcatcatgggcatgcatgacactgctttaatatgctttttatttgcttgagactgtttcttttgtttatactgaccctttagttcggtgactcttctgcaggtcgactttaacttagcctaggatccatggcccagtccaagcacggcctgaccaaggagatgaccatgaagtaccgcatggagggctgcgtggacggccacaagttcgtgatcaccggcgagggcatcggctaccccttcaagggcaagcaggccatcaacctgtgcgtggtggagggcggccccttgcccttcgccgaggacatcttgtccgccgccttcatgtacggcaaccgcgtgttcaccgagtacccccaggacatcgtcgactacttcaagaactcctgccccgccggctacacctgggaccgctccttcctgttcgaggacggcgccgtgtgcatctgcaacgccgacatcaccgtgagcgtggaggagaactgcatgtaccacgagtccaagttctacggcgtgaacttccccgccgacggccccgtgatgaagaagatgaccgacaactgggagccctcctgcgagaagatcatccccgtgcccaagcagggcatcttgaagggcgacgtgagcatgtacctgctgctgaaggacggtggccgcttgcgctgccagttcgacaccgtgtacaaggccaagtccgtgccccgcaagatgcccgactggcacttcatccagcacaagctgacccgcgaggaccgcagcgacgccaagaaccagaagtggcacctgaccgagcacgccatcgcctccggctccgccttgccctccggactcagatctcgatagggtaccaatggccagttaacagatccagctgctgctgttctagggttcacaagtctgcctatttgtcttccccaatggagctatggttgtctggtctggtccttggtcgtgtcccgtttcattgtgtactatttacctgtaatgtgtatccttaagtctggtttgatggtgtctgaaacgttttgctgtggtagagcagcatggaagaactataatgaataagtgatccctaatcattgtgtccaaattttgcttctgctatacccttttgtgctgtttcttatgttttgcttaaaaatttgatctgacaaacaaatttgtctaaattatgctcttgttctgactgtgtactgtacacatttgtattgctaccggtttggcacatagttttctctttgattgcagatcaaacccttctgattgcagattgcttggctatggctgatgtgctcactgttcttctttagcttgtatattgctgatggtggcttggctacggctgaaaaagttgctgctgcgccgacttggcaactgttgctccagtaatgctttgtcctctcttcctagccgccgacttggcacttggcagctgttgctcctgtaatgcgttgttatctcttatctcttgagatgtactatgattttgaggctgtttgacttgtgccagattgccagtgctgatgctatattatctcaggtttttatgctagtatatgttttactgtgtgctgcctgtgtcgagttacgtaatctattgaaccgctatgcgtgttgatgccctgttgttgcttgccagattgatgcccctgttgcttgcagcttgcaagctgtagtgaaatcctaaaattcgaaaccaaatctattctgaacttttgaagatctgtgatgtccggaagaaaagattcaaacagataaacgggactctccagaatctataaaataaatgatcgacaaacgctttgctttggtaggcttcctagttagttagcggaccgaagcttcggtccgggcctagaaggccagcttcggccgcccctcggtaccctgggatctgcccttactttaacgcctctaaccaacacccctttatctttataaggaacaataaacagaatttgccccactgttctaaatcacctaataatatccccagctaaaaacaataaaggtttcctagaattaagacaagcatgactgttcctccaggagggtttggaacattgttgcagtcttgcagatacgggcgaagggtgagaaacagagcggagggctggaggtgacctcggtagtcgacgccggagttgagcttgacaacgacggggcggcccctgatggacttgaggaagtccgatggcgtcttcaccgtcccgccggcgcccgaggcgggcctgtcgctgccgccgccgccgctgctcatcttgcgcgctgtgcccccggcggtgtccctgtgttgcggatcgcgggtgggccaggtggatgcgagggcgacccgtttggactccggccggagccgccggatccctggtcggtgtcagtgccgtttactctgggccccacgtgtcagtaccgtctgtagatgacaacaacccgtcgtccacagtcatgtccaaaatatcctttcttcttttttttcgattcggatatctatcttccttttttttttccaaaaatcttcttgacgcaccagcgcgcacgtttgtggtaaacgccgacacgtcggtcccacgtcgatagaccccacccaccagtgagtagcgtgtacgtattcgggggtgacggacgtgtcgccgtcgtcttgctagtcccattcccatctgagccacacatctctgaacaaaaaaaaggagggaggcctccacgcacatccccctccgtgccacccgccccaaaccctcgcgccgcctccgagacagccgccgcaaccatggccaccgccgccgccgcgtctaccgcgctcactggcgccactaccgctgcgcccaaggcgaggcgccgggcgcacctcctggccacccgccgcgccctcgccgcgcccatcaggtgctcagcggcgtcacccgccatgccgatggctcccccggccaccccgctccggccgtggggccccaccgagccccgcaagggtgctgacatcctcgtcgagtccctcgagcgctgcggcgtccgcgacgtcttcgcctaccccggcggcgcgtccatggagatccaccaggcactcacccgctcccccgtcatcgccaaccacctcttccgccacgagcaaggggaggcctttgccgcctccggctacgcgcgctcctcgggccgcgtcggcgtctgcatcgccacctccggccccggcgccaccaacctagtctccgcgctcgccgacgcgctgctcgattccgtccccatggtcgccatcacgggacaggtggcgcgacgcatgattggcaccgacgccttccaggagacgcccatcgtcgaggtcacccgctccatcaccaagcacaactacctggtcctcgacgtcgacgacatcccccgcgtcgtgcaggaggctttcttcctcgcctcctctggtcgaccagggccggtgcttgtcgacatccccaaggacatccagcagcagatggcggtgcctgtctgggacaagcccatgagtctgcctgggtacattgcgcgccttcccaagccccctgcgactgagttgcttgagcaggtgctgcgtcttgttggtgaatcgcggcgccctgttctttatgtgggcggtggctgcgcagcatctggtgaggagttgcgacgctttgtggagctgactggaatcccggtcacaactactcttatgggcctcggcaacttccccagcgacgacccactgtctctgcgcatgctaggtatgcatgggacggtgtatgcaaattatgcagtggataaggccgatctgttgcttgcacttggtgtgcggtttgatgatcgcgtgacagggaagattgaggcttttgcaagcagggctaagattgtgcacgttgatattgatccggctgagattggcaagaacaagcagccacatgtgtccatctgtgcagatgttaagcttgctttgcagggcatgaatgctcttcttgaaggaagcacatcaaagaagagctttgactttggctcatggaacgatgagttggatcagcagaagagggaattcccccttgggtataaaacatctaatgaggagatccagccacaatatgctattcaggttcttgatgagctgacgaaaggcgaggccatcatcggcacaggtgttgggcagcaccagatgtgggcggcacagtactacacttacaagcggccaaggcagtggttgtcttcagctggtcttggggctatgggatttggtttgccggctgctgctggtgcttctgtggcaaacccaggtgtcactgttgttgacatcgatggagatggtagctttctcatgaacgttcaggagctagctatgatccgaattgagaacctcccagtgaaggtctttgtgctaaacaaccagcacctggggatggtggtgcagttggaggacaggttctataaggccaacagagcgcacacatacttgggaaacccagagaatgaaagtgagatatatccagatttcgtgacgatcgccaaagggttcaacattccagccgtccgtgtgacaaagaagaacgaagtccgcgcagcgataaagaagatgctcgagactccagggccgtacctcttggatataatcgtcccacaccaggagcatgtgttgcctatgatccctagtggtggggctttcaaggatatgatcctggatggtgatggcaggactgtgtactgacttcgaataggtacccggggatcctctagtgccgtgggtcgtttaagctgccgctgtacctgtgtcgtctggtgccttctggtgtacctgggaggttgtcgtctatcaagtatctgtggttggtgtcatgagtcagtgagtcccaatactgttcgtgtcctgtgtgcattatacccaaaactgttatgggcaaatcatgaataagcttgatgttcgaacttaaaagtctctgctcaatatggtattatggttgtttttgttcgtctcctaatatttgcctgggatcaaattttattggctggtgttcatttgacctccatgttcttgctaggctccattttttactctacagccataatatgtttgattgtttggtttgttctttgttgtacacctggttctgtcgagcttagttttcgacactggcttacagcttaacatgttgctattttattgggttctgattgctattttattgggttctgattgctagtttttgctgaatccaaaaaccatgttatttatttaagcgatccaggttattattatgatggtggctaagtttttttttttccaagggtaaattttctggattctccagtgtttctgtggccgaattcaatcactagagtcgacctgcaaagcttcggtccgggcctagaaggcccgcgccacttactcttgattccgatgacttcgtaggttcctagctcaagccgctcgtgtccaagcgtcacttacgattagctaatgattacggcatctaggaccgactagttcttatgtgcttctagtctccaaatgtggttgatagttattttgctctaagatcaacagtaatgaagtataaatcatcgttgtggtgtgctactcggttaattgagcattaacacacacaaacatgacgaggatggtataatctccaaaaatgtgtactttgttaggtgggaccctatagccttgattaatgtgctatgttaggcatgcctggaaacgtgtgacgcatatgttttgtgaacctgttgatattatatgtgcttttatattaccatattttattaaaatactaatatttattactagtaagatataacattctatctagcttaaaaactaaccataaatattccataataactagatttaccaaactaatatactaaatatacataataaatacaaaattaacaagacaataatcaatatttatgagcttaatatatttagacattatggttggtcgacgataatcatgctaacttttcgtaattgcttgattgaaatatgcttagaataatgcctctttgttctacatggcaaatagggaccattatggtgtaacaccctgggaaccacaaacaccccgaaatgctactaaactacacaactaaccttcatatataaaatttcgacagcatctcctttgaaaatttgcatagacgtggaagcaacagagtataaacagatctgcgtttaaacgtgcaagcgctactagacaattcagtacattaaaaacgtccgcaatgtgttattaagttgtctaagcgtcaatttgtttacaccacaatatatcctgcca

SEQ ID NO: 151 - DNA, 20733 bp, unidentified
  source 1..20733: mol_type = other DNA; note = Artificial
gtttacccgccaatatatcctgtcaaacactgcggccgcacttgaccgcggatggagccggagctgtggtgaggccatcgacgggaggtgggggagaacacagtctcagtgttctttgtgagtccgcaaggtttttagcttttctgtattaattaaggttgctgttggctgtagaatacggtcgtggaagagctgtatcggtagctactacgtaagctattatatactggaagtctggagctcgtcgatctccggtcgtcttcctccatttctcctcgtcttgctttgactgctgctaccatttgcttctgttttctgatgaagcatgccatgtcggccaccagtgtttgtgtggtttttgcagggaatggctttcaagtgctgtgattgaatggccctcgtcgtcctcggctgagctcacatggacgcgtcatgtgagtgagatatatgatcatatgatgagtggggttcgggtgagtgcgtacttgaagtaggatcccgctttcactcattcattcattggcctttaaaccgggaaattttcgcgaggagatggagggaagcaagcagggtgacgagtgcagagtgccgcgagcgctttgtcaaaaggcaccgccgtaggcaaaaaaatcaatggccctgactgactcgatggtagtactactgtagagactagagagggttgctccccatatcttcgtgtgacttttactccagcattgcatttccgtcattgagacgttaattaatagcagctttcgggacagatgactgtggccatgtttcgtcacggccgcttcgtgccagctgggggtactatagtactgtgattttgttagtaaaaactttcattaggccaccattgacgaccgggccttcgcttttgctgcgctaattaaccatttcccggcgaccgaagggaacatgaacatgccccgacacatgagggcatgaggactagtgttctccctgtcgttcgttgacttgactagtgatagtttaaacgctcttcaactggaagagcggttactaccggttcactagctagctgctaatcgagctagttaccctatgaggtgacatgaagcgctcacggttactatgacggttagcttcacgactgttggtggcagtagcgtacgacttagctatagttccggacttacctagctaataacttcgtatagcatacattatacgaagttatggttaccgagctcccctggccgaagcttacactgatagtttaaactgaaggcgggaaacgacaatctgatcatgagcggagaattaagggagtcacgttatgacccccgccgatgacgcgggacaagccgttttacgtttggaactgacagaaccgcaacgattgaaggagccactcagccgcgggtttctggagtttaatgagctaagcacatacgtcagaaaccattattgcgcgttcaaaagtcgcctaaggtcactatcagctagcaaatatttcttgtcaaaaatgctccactgacgttccataaattcccctcggtatccaattagagtctcatattcactcccatggcggccaatgcgggcggcggtggagcgggaggaggcagcggcagcggcagcgtggctgcgccggcggtgtgccgccccagcggctcgcggtggacgccgacgccggagcagatcaggatgctgaaggagctctactacggctgcggcatccggtcgcccagctcggagcagatccagcgcatcaccgccatgctgcggcagcacggcaagatcgagggcaagaacgtcttctactggttccagaaccacaaggcccgcgagcgccagaagcgccgcctcaccagcctcgacgtcaacgtgcccgccgccggcgcggccgacgccaccaccagccaactcggcgtcctctcgctgtcgtcgccgccgccttcaggcgcggcgcctccctcgcccaccctcggcttctacgccgccggcaatggcggcggatcggctgtgctgctggacacgagttccgactggggcagcagcggcgctgctatggccaccgagacatgcttcctgcaggactacatgggcgtgacggacacgggcagctcgtcgcagtggccacgcttctcgtcgtcggacacgataatggcggcggccgcggcgcgggcggcgacgacgcgggcgcccgagacgctccctctcttcccgacctgcggcgacgacggcggcagcggtagcagcagctacttgccgttctggggtgccgcgtccacaactgccggcgccacttcttccgttgcgatccaacagcaacaccagctgcaggagcagtacagcttttacagcaacagcaacagcacccagctggccggcaccggcaaccaagacgtatcggcaacagcagcagcagccgccgccctggagctgagcctcagctcatggtgctccccttaccctgctgcagggagtatgtgagagcaacgcgagctgccactgctcttcactgatgtctctggaatggaaggaggaggaagtgagaacagatcattcgacaaagcagcattagtccgttgatcggtggaagaccactcgtcagtgttgagttgaatgtttgatcaataaaatacggcaatgctgtaagggttgttttttatgccattgataatacactgtactgttcagttgttgaactctatttcttagccatgccaagtgcttttcttattttgaataacattacagcaaaaagttgaaagacaaaaaaaaaaacccccgaacagagtgctttgggtcccaagcttctttagactgtgttcggcgttccccctaaatttctccccctatatctcactcacttgtcacatcagcgttctctttccccctatatctccacgctctacagcagttccacctatatcaaacctctataccccaccacaacaatattatatactttcatcttcaactaactcatgtaccttccaatttttttctactaataattatttacgtgcacagaaacttagcaaggagagagagagcgggaatttaaatgctcggcgttaggcttttagtccgctaggtggctagaccgaggttaggacgctagttcactaggggcctagtggtgttttaagacgtcacggtcaccgcggccgcatcgagcagctggcttgtggggaccagacaaaaaaggaatggtgcagaattgttaggcgcacctaccaaaagcatctttgcctttattgcaaagataaagcagattcctctagtacaagtggggaacaaaataacgtggaaaagagctgtcctgacagcccactcactaatgcgtatgacgaacgcagtgacgaccacaaaactcgagcaacgagatcatgagccaatcaaagaggagtgatgtagacctaaagcaataatggagccatgacgtaagggcttacgcccatacgaaataattaaaggctgatgtgacctgtcggtctctcagaacctttactttttatgtttggcgtgtatttttaaatttccacggcaatgacgatgtgaccgtcgacccactaaaacattgctttgtcaaaagctaaaaaagatgatgcccgacagccacttgtgtgaagcatgagaagccggtccctccactaagaaaattagtgaagcatcttccagtggtccctccactcacagctcaatcagtgagcaacaggacgaaggaaatgacgtaagccatgacgtctaatcccattcgaaacgcgtggaccgaagcttgcatgcctgcagtgcagcgtgacccggtcgtgcccctctctagagataatgagcattgcatgtctaagttataaaaaattaccacatattttttttgtcacacttgtttgaagtgcagtttatctatctttatacatatatttaaactttactctacgaataatataatctatagtactacaataatatcagtgttttagagaatcatataaatgaacagttagacatggtctaaaggacaattgagtattttgacaacaggactctacagttttatctttttagtgtgcatgtgttctcctttttttttgcaaatagcttcacctatataatacttcatccattttattagtacatccatttagggtttagggttaatggtttttatagactaatttttttagtacatctattttattctattttagcctctaaattaagaaaactaaaactctattttagtttttttatttaataatttagatataaaatagaataaaataaagtgactaaaaattaaacaaataccctttaagaaattaaaaaaactaaggaaacatttttcttgtttcgagtagataatgccagcctgttaaacgccgtcgacgagtctaacggacaccaaccagcgaaccagcagcgtcgcgtcgggccaagcgaagcagacggcacggcatctctgtcgctgcctctggacccctctcgagagttccgctccaccgttggacttgctccgctgtcggcatccagaaattgcgtggcggagcggcagacgtgagccggcacggcaggcggcctcctcctcctctcacggcaccggcagctacgggggattcctttcccaccgctccttcgctttcccttcctcgcccgccgtaataaatagacaccccctccacaccctctttccccaacctcgtgttgttcggagcgcacacacacacaaccagatctcccccaaatccacccgtcggcacctccgcttcaaggtacgccgctcgtcctcccccccccccctctctaccttctctagatcggcgttccggtccatgcatggttagggcccggtagttctacttctgttcatgtttgtgttagatccgtgtttgtgttagatccgtgctgctagcgttcgtacacggatgcgacctgtacgtcagacacgttctgattgctaacttgccagtgtttctctttggggaatcctgggatggctctagccgttccgcagacgggatcgatttcatgattttttttgtttcgttgcatagggtttggtttgcccttttcctttatttcaatatatgccgtgcacttgtttgtcgggtcatcttttcatgcttttttttgtcttggttgtgatgatgtggtctggttgggcggtcgttctagatcggagtagaattctgtttcaaactacctggtggatttattaattttggatctgtatgtgtgtgccatacatattcatagttacgaattgaagatgatggatggaaatatcgatctaggataggtatacatgttgatgcgggttttactgatgcatatacagagatgctttttgttcgcttggttgtgatgatgtggtgtggttgggcggtcgttcattcgttctagatcggagtagaatactgtttcaaactacctggtgtatttattaattttggaactgtatgtgtgtgtcatacatcttcatagttacgagtttaagatggatggaaatatcgatctaggataggtatacatgttgatgtgggttttactgatgcatatacatgatggcatatgcagcatctattcatatgctctaaccttgagtacctatctattataataaacaagtatgttttataattattttgatcttgatatacttggatgatggcatatgcagcagctatatgtggatttttttagccctgccttcatacgctatttatttgcttggtactgtttcttttgtcgatgctcaccctgttgtttggtgttacttctgcaggtcgactttaacttagcctaggatccatggccactgtgaacaactggctcgctttctccctctccccgcaggagctgccgccctcccagacgacggactccacactcatctcggccgccaccgccgaccatgtctccggcgatgtctgcttcaacatcccccaagattggagcatgaggggatcagagctttcggcgctcgtcgcggagccgaagctggaggacttcctcggcggcatctccttctccgagcagcatcacaaggccaactgcaacatgatacccagcactagcagcacagtttgctacgcgagctcaggtgctagcaccggctaccatcaccagctgtaccaccagcccaccagctcagcgctccacttcgcggactccgtaatggtggcttcctcggccggtgtccacgacggcggtgccatgctcagcgcggccgccgctaacggtgtcgctggcgctgccagtgccaacggcggcggcatcgggctgtccatgattaagaactggctgcggagccaaccggcgcccatgcagccgagggtggcggcggctgagggcgcgcaggggctctctttgtccatgaacatggcggggacgacccaaggcgctgctggcatgccacttctcgctggagagcgcgcacgggcgcccgagagtgtatcgacgtcagcacagggtggagccgtcgtcgtcacggcgccgaaggaggatagcggtggcagcggtgttgccggcgctctagtagccgtgagcacggacacgggtggcagcggcggcgcgtcggctgacaacacggcaaggaagacggtggacacgttcgggcagcgcacgtcgatttaccgtggcgtgacaaggcatagatggactgggagatatgaggcacatctttgggataacagttgcagaagggaagggcaaactcgtaagggtcgtcaagtctatttaggtggctatgataaagaggagaaagctgctagggcttatgatcttgctgctctgaagtactggggtgccacaacaacaacaaattttccagtgagtaactacgaaaaggagctcgaggacatgaagcacatgacaaggcaggagtttgtagcgtctctgagaaggaagagcagtggtttctccagaggtgcatccatttacaggggagtgactaggcatcaccaacatggaagatggcaagcacggattggacgagttgcagggaacaaggatctttacttgggcaccttcagcacccaggaggaggcagcggaggcgtacgacatcgcggcgatcaagttccgcggcctcaacgccgtcaccaacttcgacatgagccgctacgacgtgaagagcatcctggacagcagcgccctccccatcggcagcgccgccaagcgcctcaaggaggccgaggccgcagcgtccgcgcagcaccaccacgccggcgtggtgagctacgacgtcggccgcatcgcctcgcagctcggcgacggcggagccctggcggcggcgtacggcgcgcactaccacggcgccgcctggccgaccatcgcgttccagccgggcgccgccagcacaggcctgtaccacccgtacgcgcagcagccaatgcgcggcggcgggtggtgcaagcaggagcaggaccacgcggtgatcgcggccgcgcacagcctgcaggacctccaccacctgaacctgggcgcggccggcgcgcacgactttttctcggcagggcagcaggccgccgccgctgcgatgcacggcctgggtagcatcgacagtgcgtcgctcgagcacagcaccggctccaactccgtcgtctacaacggcggggtcggcgacagcaacggcgccagcgccgtcggcggcagtggcggtggctacatgatgccgatgagcgctgccggagcaaccactacatcggcaatggtgagccacgagcaggtgcatgcacgggcctacgacgaagccaagcaggctgctcagatggggtacgagagctacctggtgaacgcggagaacaatggtggcggaaggatgtctgcatgggggactgtcgtgtctgcagccgcggcggcagcagcaagcagcaacgacaacatggccgccgacgtcgggcatggcggcgcgcagctcttcagtgtctggaacgacacttaagcgtacctagtggtacctgacatcttatagtctgcaacctctcgtgtctgaattcctatctttatcaagtgttattgcttccacgactataggacagctttcgtcgaaagcttttgctcatgtgatctcgaaggattcatctagtctgatttttcgtgacttgtatcggttttattggattcatccaacatatatcaataaaaaatgagttgtgtttcctttcttcctagttcagttaaaattatttccctcctgcgcttgtgctgtaattgtctgtgtacctgttgtttgtgactgtgttagttcccttggatatgatttcgtatttgatatgtacatggagatagcttagcttcattattggagtatgaagttagtatgacatagtcactctcctggaaaattgacactgcaaaccatatttttattctgaaccacaaatcctagtcagtccgctggcatatgccgtccgtttgctgaatccagaacgtgggtttggagatgtacggctgagatgcctctatgcgaaggggatttcgtggtgaaacgagatgggagtagagcaacgcccgtggaagatgcttcaaacttccacacttttgagcaacgatcggcagtagtaaggtagacgatttcaagatcaaagcatatgaagataaacaacatcaacaacaaaatttgttggggttctatagagagaaacagagctacatacatacactgttttgtatctaccatctgagatgatgaaaagatgaaaaactaaagaatgccccggcgccaacgccaggacacgccgcgcgcgcgtcacccgagccatctcttgacccagccggcgctgtatatttacacacgttgcagcatcgatcaccacctgttcgatcgcgtcgccgtcaccggcgcgccgcgacttattgaactagtctagggcgcggctaacaacctagcttagattgccttgtctaaacccttaggctaacgcgccactctagaaggccgatctccccgggttaccgaattcgagctcggtaccctggttcacaaactcaatacaacacacagtggagtagggtattacgctccggcggcccgaaccactctaaatccttgtgtcctcgtgtgctcttccaccattaatgactgtaattgcagggacacgaagagttgtagcgcttttgccaacaagatccgctatatgctagtagagtggaacctgcacagcaacaagcatccaataatctgagaataagaattatgtgtggtgatggttctcatctctgcaactcgccattttcgcgagagaaccaaatccaagttggtgaagatcatgatttgggctcatgggctggcatagtagctattacctttgcaattgtggttcgaatctatccgatattctccttttcagggagagctaatgcttatgcttattgggtattttggtttgacactgcttcacgcccaaaaaaaggcaactatgtctgagttggatatggcccaaaaaaaggcagctatgtctgagttggatatggaagtcttctttcgtttagggtgaagtaagaccaagctcatgagcttattatcttaggtcggaacaaattagttgataggcatggcacatttatcaaattataatgattttaacagaaaagcaacacctctttttcagcagcaccagctttgcaagctgcaattgacactccaagcatagtatttgctccaaactcagcctgcatttcgcacaatatcatatctatttccatttggataaaatatattttccagaaatatgggaacagaatcaagatacagaaaaaagttgtggtagtagtggtaagtggaaacacaagtacagtgaaaagatagcattatttctgaacagtcaaattaaccgaaataagtagtatcacatactgcccctaaattgactacacccaatgtaaagaattgcttgagcatattgagccatcagttgtttgtttgtgtaacggatttgacaatgcagagttcaggagcaaaaaaccgcaaaggagagaaagagggaaaggatctcctagtatcccaccttgtggcgcgccctgtcaagtgcatgatggcctggtcgatctgcgtctgctgctgcggttccatcccaacgagtgcctccgacaccttgtcgttgatcacccgcaccgcgtaggcgacccccctggcgaggaacttccgcctctcggaggccccggccgcgtcggcggcggcgccctcgagcgcgcccacgctagccgtagatgctcggtgcacggccttgttggtgtgcaactcgacctcaacggccggtgcgctacgcccgtcaaggatctggcgcgcccgcaccctcgtgatcacggtgggcgcctcccgcctcatgtggccgacgatgaaaagcgccgggttaggggccttggcgcgcaccgccgtattcagggcctcctcgctcttgcgcgagagcaggtgcttccccaggtactcctgcactgacaaggctgccacagcggtggaatttgtcctcacgacttcgccacgtcgtcctcacctccctggcttcccacgactccgccgtatcgaggtgctcggtgggtcgtcttaatccgaagtccgaactaggaagacgagacagagaggtctgaggaatgggcctcgtttgatgttgagctgaattatttttccagcataagcccaggtcttggtccatgaacaaaattactagaaacccagcccagtactacgatctaaaagagggactgccactggatagctctctctagcattctccacgctccaatacagcggcgtcgtgtctatccgggtctatccgcgaacacgtgagaactctccagaaactgctttctcctccacttcatctctctcgctttccctctataaaaagaccccttctaggaattgagggagacagcaagcaccaagcagcgatccgaagctcaatcaattcactcaaacctcttccccaaatcttcgattagatcttcgttgacaagaagactagaaccgaacctgacatgtccaacctgctcacggttcaccagaaccttccggctcttccagtggacgcgacgtccgatgaagtcaggaagaacctcatggacatgttccgcgacaggcaagcgttcagcgagcacacctggaagatgctgctctccgtctgccgctcctgggctgcatggtgcaagctgaacaacaggaagtggttccccgctgagcccgaggacgtgagggattaccttctgtacctgcaagcgcgaggtttgtttctgcttctacctttgatatatatataataattatcattaattagtagtaatataatatttcaaatatttttttcaaaataaaagaatgtagtatatagcaattgcttttctgtagtttataagtgtgtatattttaatttataacttttctaatatatgaccaaaacatggtgatgcctaggtctggcagtgaagaccatccagcaacaccttggacaactgaacatgcttcacaggcgctccggcctcccgcgccccagcgactcgaacgccgtgagcctcgtcatgcgccgcatcaggaaggaaaacgtcgatgccggcgaaagggcaaagcaggccctcgcgttcgagaggaccgatttcgaccaggtccgcagcctgatggagaacagcgacaggtgccaggacattaggaacctggcgttcctcggaattgcatacaacacgctcctcaggatcgcggaaattgcccgcattcgcgtgaaggacattagccgcaccgacggcggcaggatgcttatccacattggcaggaccaagacgctcgtttccaccgcaggcgtcgaaaaggccctcagcctcggagtgaccaagctcgtcgaacgctggatctccgtgtccggcgtcgcggacgacccaaacaactacctcttctgccgcgtccgcaagaacggggtggctgcccctagcgccaccagccaactcagcacgagggccttggaaggtattttcgaggccacccaccgcctgatctacggcgcgaaggatgacagcggtcaacgctacctcgcatggtccgggcactccgcccgcgttggagctgctagggacatggcccgcgccggtgtttccatccccgaaatcatgcaggcgggtggatggacgaacgtgaacattgtcatgaactacattcgcaaccttgacagcgagacgggcgcaatggttcgcctcctggaagatggtgactgaggtacccaacctagacttgtccatcttctggattggccaacttaattaatgtatgaaataaaaggatgcacacatagtgacatgctaatcactataatgtgggcatcaaagttgtgtgttatgtgtaattactagttatctgaataaaagagaaagagatcatccatatttcttatcctaaatgaatgtcacgtgtctttataattctttgatgaaccagatgcatttcattaaccaaatccatatacatataaatattaatcatatataattaatatcaattgggttagcaaaacaaatctagtctaggtgtgttttgcgatccgatatcgatgacgtctaaaaacggcccctaactaacgcttagttgcccgctagattagtcccccgttagtgcctagttagacacacgacgaactaggggctagccgtgcgcacgataacttcgtatagcatacattatacgaagttataacagcggaccgggttaccgaattcctgcccttaaggccaattgttcaagattcattcaacaattgaaacatctcccatgattaaatcagtataaggttgctatggtcttgcttgacaaagtttttttttgagggaatttcaactaaatttttgagtgaaactatcaaatactgattttaaaaaatttttataaaaggaagcgcagagataaaaggccatctatgctacaaaagtacccaaaaatgtaatcctaaagtatgaattgcattttttttttgtttggacgaaaggaaaggagtattaccacaagaatgatatcatcttcatatttagatcttttttgggtaaagcttgagattctctaaatatagagaaatcagaagaaaaaaaaaccgtgttttggtggttttgatttctagcctccacaataactttgacggcgtcgacaagtctaacggacaccaagcagcgaaccaccagcgccgagccaagcgaagcagacggccgagacgttgacaccttcggcgcggcatctctcgagagttccgctccggcgctccacctccaccgctggcggtttcttattccgttccgttccgcctcctgctctgctcctctccacaccacacggcacgaaaccgttacggcaccggcagcacccagcacgggagaggggattcctttcccaccgttccttccctttccgccccgccgctataaatagccagccccatccccagcttttttccccaatctcatctcctctctcctgttgttcggagcacacgcacaatccgatcgatccccaaatccccttcgtctctcctcgcgagcctcgtggatcccagcttcaaggtacggcgatcgatcatcccccctccttctctctaccttcttttctctagactacatcggatggcgatccatggttagggcctgctagtttcccttcctgttttgtcgatggctgcgaggcacaatagatctgatggcgttatgacggctaacttgtcatgttgttgcgatttatagtccctttaggagatcagtttaatttctcggatggttcgagatcggtggtccatggttagtaccctaagatccgcgctgttagggttcgtagatggaggcgacctgttctgattgttaacttgtcagtacctgggaaatcctgggatggttctagctcgtccgcagatgagatcgatttcatgatcctctgtatcttgtttcgttgcctaggttccgtctaatctatccgtggtatgatgtagatgttttgatcgtgctaactacgtcttgtaaagttaattgtcaggtcataatttttagcatgcctttttttttgtttggttttgtctaattgggctgtcgttctagatcagagtagaagactgttccaaactacctgctggatttattgaacttggatctgtatgtgtgtcacatatcttcataaattcatgattaagatggattgaaatatcttttatctttttggtatggatagttctatatgttggtgtggctttgttagatgtatacatgcttagatacatgaagcaacgtgctgctactgtttagtaattgctgttcatttgtctaataaacagataaggatatgtatttatgttgctgttggttttgctggtactttgttggatacaaatgcttcaatacagaaaacagcatgctgctacgatttaccatttatctaatcttatcatatgtctaatctaataaacaaacatgcttttaaattatcttcatatgcttggatgatggcatacacagcggctatgtgtggttttttaaatacccagcatcatgggcatgcatgacactgctttaatatgctttttatttgcttgagactgtttcttttgtttatactgaccctttagttcggtgactcttctgcaggtcgactttaacttagcctaggatccatggcccagtccaagcacggcctgaccaaggagatgaccatgaagtaccgcatggagggctgcgtggacggccacaagttcgtgatcaccggcgagggcatcggctaccccttcaagggcaagcaggccatcaacctgtgcgtggtggagggcggccccttgcccttcgccgaggacatcttgtccgccgccttcatgtacggcaaccgcgtgttcaccgagtacccccaggacatcgtcgactacttcaagaactcctgccccgccggctacacctgggaccgctccttcctgttcgaggacggcgccgtgtgcatctgcaacgccgacatcaccgtgagcgtggaggagaactgcatgtaccacgagtccaagttctacggcgtgaacttccccgccgacggccccgtgatgaagaagatgaccgacaactgggagccctcctgcgagaagatcatccccgtgcccaagcagggcatcttgaagggcgacgtgagcatgtacctgctgctgaaggacggtggccgcttgcgctgccagttcgacaccgtgtacaaggccaagtccgtgccccgcaagatgcccgactggcacttcatccagcacaagctgacccgcgaggaccgcagcgacgccaagaaccagaagtggcacctgaccgagcacgccatcgcctccggctccgccttgccctccggactcagatctcgatagggtaccaatggccagttaacagatccagctgctgctgttctagggttcacaagtctgcctatttgtcttccccaatggagctatggttgtctggtctggtccttggtcgtgtcccgtttcattgtgtactatttacctgtaatgtgtatccttaagtctggtttgatggtgtctgaaacgttttgctgtggtagagcagcatggaagaactataatgaataagtgatccctaatcattgtgtccaaattttgcttctgctatacccttttgtgctgtttcttatgttttgcttaaaaatttgatctgacaaacaaatttgtctaaattatgctcttgttctgactgtgtactgtacacatttgtattgctaccggtttggcacatagttttctctttgattgcagatcaaacccttctgattgcagattgcttggctatggctgatgtgctcactgttcttctttagcttgtatattgctgatggtggcttggctacggctgaaaaagttgctgctgcgccgacttggcaactgttgctccagtaatgctttgtcctctcttcctagccgccgacttggcacttggcagctgttgctcctgtaatgcgttgttatctcttatctcttgagatgtactatgattttgaggctgtttgacttgtgccagattgccagtgctgatgctatattatctcaggtttttatgctagtatatgttttactgtgtgctgcctgtgtcgagttacgtaatctattgaaccgctatgcgtgttgatgccctgttgttgcttgccagattgatgcccctgttgcttgcagcttgcaagctgtagtgaaatcctaaaattcgaaaccaaatctattctgaacttttgaagatctgtgatgtccggaagaaaagattcaaacagataaacgggactctccagaatctataaaataaatgatcgacaaacgctttgctttggtaggcttcctagttagttagcggaccgaagcttcggtccgggcctagaaggccagcttcggccgcccctcggtaccctgggatctgcccttactttaacgcctctaaccaacacccctttatctttataaggaacaataaacagaatttgccccactgttctaaatcacctaataatatccccagctaaaaacaataaaggtttcctagaattaagacaagcatgactgttcctccaggagggtttggaacattgttgcagtcttgcagatacgggcgaagggtgagaaacagagcggagggctggaggtgacctcggtagtcgacgccggagttgagcttgacaacgacggggcggcccctgatggacttgaggaagtccgatggcgtcttcaccgtcccgccggcgcccgaggcgggcctgtcgctgccgccgccgccgctgctcatcttgcgcgctgtgcccccggcggtgtccctgtgttgcggatcgcgggtgggccaggtggatgcgagggcgacccgtttggactccggccggagccgccggatccctggtcggtgtcagtgccgtttactctgggccccacgtgtcagtaccgtctgtagatgacaacaacccgtcgtccacagtcatgtccaaaatatcctttcttcttttttttcgattcggatatctatcttccttttttttttccaaaaatcttcttgacgcaccagcgcgcacgtttgtggtaaacgccgacacgtcggtcccacgtcgatagaccccacccaccagtgagtagcgtgtacgtattcgggggtgacggacgtgtcgccgtcgtcttgctagtcccattcccatctgagccacacatctctgaacaaaaaaaaggagggaggcctccacgcacatccccctccgtgccacccgccccaaaccctcgcgccgcctccgagacagccgccgcaaccatggccaccgccgccgccgcgtctaccgcgctcactggcgccactaccgctgcgcccaaggcgaggcgccgggcgcacctcctggccacccgccgcgccctcgccgcgcccatcaggtgctcagcggcgtcacccgccatgccgatggctcccccggccaccccgctccggccgtggggccccaccgagccccgcaagggtgctgacatcctcgtcgagtccctcgagcgctgcggcgtccgcgacgtcttcgcctaccccggcggcgcgtccatggagatccaccaggcactcacccgctcccccgtcatcgccaaccacctcttccgccacgagcaaggggaggcctttgccgcctccggctacgcgcgctcctcgggccgcgtcggcgtctgcatcgccacctccggccccggcgccaccaacctagtctccgcgctcgccgacgcgctgctcgattccgtccccatggtcgccatcacgggacaggtggcgcgacgcatgattggcaccgacgccttccaggagacgcccatcgtcgaggtcacccgctccatcaccaagcacaactacctggtcctcgacgtcgacgacatcccccgcgtcgtgcaggaggctttcttcctcgcctcctctggtcgaccagggccggtgcttgtcgacatccccaaggacatccagcagcagatggcggtgcctgtctgggacaagcccatgagtctgcctgggtacattgcgcgccttcccaagccccctgcgactgagttgcttgagcaggtgctgcgtcttgttggtgaatcgcggcgccctgttctttatgtgggcggtggctgcgcagcatctggtgaggagttgcgacgctttgtggagctgactggaatcccggtcacaactactcttatgggcctcggcaacttccccagcgacgacccactgtctctgcgcatgctaggtatgcatgggacggtgtatgcaaattatgcagtggataaggccgatctgttgcttgcacttggtgtgcggtttgatgatcgcgtgacagggaagattgaggcttttgcaagcagggctaagattgtgcacgttgatattgatccggctgagattggcaagaacaagcagccacatgtgtccatctgtgcagatgttaagcttgctttgcagggcatgaatgctcttcttgaaggaagcacatcaaagaagagctttgactttggctcatggaacgatgagttggatcagcagaagagggaattcccccttgggtataaaacatctaatgaggagatccagccacaatatgctattcaggttcttgatgagctgacgaaaggcgaggccatcatcggcacaggtgttgggcagcaccagatgtgggcggcacagtactacacttacaagcggccaaggcagtggttgtcttcagctggtcttggggctatgggatttggtttgccggctgctgctggtgcttctgtggcaaacccaggtgtcactgttgttgacatcgatggagatggtagctttctcatgaacgttcaggagctagctatgatccgaattgagaacctcccagtgaaggtctttgtgctaaacaaccagcacctggggatggtggtgcagttggaggacaggttctataaggccaacagagcgcacacatacttgggaaacccagagaatgaaagtgagatatatccagatttcgtgacgatcgccaaagggttcaacattccagccgtccgtgtgacaaagaagaacgaagtccgcgcagcgataaagaagatgctcgagactccagggccgtacctcttggatataatcgtcccacaccaggagcatgtgttgcctatgatccctagtggtggggctttcaaggatatgatcctggatggtgatggcaggactgtgtactgacttcgaataggtacccggggatcctctagtgccgtgggtcgtttaagctgccgctgtacctgtgtcgtctggtgccttctggtgtacctgggaggttgtcgtctatcaagtatctgtggttggtgtcatgagtcagtgagtcccaatactgttcgtgtcctgtgtgcattatacccaaaactgttatgggcaaatcatgaataagcttgatgttcgaacttaaaagtctctgctcaatatggtattatggttgtttttgttcgtctcctaatatttgcctgggatcaaattttattggctggtgttcatttgacctccatgttcttgctaggctccattttttactctacagccataatatgtttgattgtttggtttgttctttgttgtacacctggttctgtcgagcttagttttcgacactggcttacagcttaacatgttgctattttattgggttctgattgctattttattgggttctgattgctagtttttgctgaatccaaaaaccatgttatttatttaagcgatccaggttattattatgatggtggctaagtttttttttttccaagggtaaattttctggattctccagtgtttctgtggccgaattcaatcactagagtcgacctgcaaagcttcggtccgggcctagaaggcccgcgccacttacgcttgattccgatgacttcgtaggttcctagctcaagccgctcgtgtccaagcgtcacttacgattagctaatgattacggcatctaggaccgactagttcttatgtgcttctagtctccaaatgtggttgatagttattttgctctaagatcaacagtaatgaagtataaatcatcgttgtggtgtgctactcggttaattgagcattaacacacacaaacatgacgaggatggtataatctccaaaaatgtgtactttgttaggtgggaccctatagccttgattaatgtgctatgttaggcatgcctggaaacgtgtgacgcatatgttttgtgaacctgttgatattatatgtgcttttatattaccatattttattaaaatactaatatttattactagtaagatataacattctatctagcttaaaaactaaccataaatattccataataactagatttaccaaactaatatactaaatatacataataaatacaaaattaacaagacaataatcaatatttatgagcttaatatatttagacattatggttggtcgacgataatcatgctaacttttcgtaattgcttgattgaaatatgcttagaataatgcctctttgttctacatggcaaatagggaccattatggtgtaacaccctgggaaccacaaacaccccgaaatgctactaaactacacaactaaccttcatatataaaatttcgacagcatctcctttgaaaatttgcatagacgtggaagcaacagagtataaacagatctgcgtttaaacgtgcaagcgctactagacaattcagtacattaaaaacgtccgcaatgtgttattaagttgtctaagcgtcaatttgtttacaccacaatatatcctgcca

SEQ ID NO: 152 - DNA, 20881 bp, unidentified
  source 1..20881: mol_type = other DNA; note = Artificial
gtttacccgccaatatatcctgtcaaacactgcggccgcacttgaccgcggatggagccggagctgtggtgaggccatcgacgggaggtgggggagaacacagtctcagtgttctttgtgagtccgcaaggtttttagcttttctgtattaattaaggttgctgttggctgtagaatacggtcgtggaagagctgtatcggtagctactacgtaagctattatatactggaagtctggagctcgtcgatctccggtcgtcttcctccatttctcctcgtcttgctttgactgctgctaccatttgcttctgttttctgatgaagcatgccatgtcggccaccagtgtttgtgtggtttttgcagggaatggctttcaagtgctgtgattgaatggccctcgtcgtcctcggctgagctcacatggacgcgtcatgtgagtgagatatatgatcatatgatgagtggggttcgggtgagtgcgtacttgaagtaggatcccgctttcactcattcattcattggcctttaaaccgggaaattttcgcgaggagatggagggaagcaagcagggtgacgagtgcagagtgccgcgagcgctttgtcaaaaggcaccgccgtaggcaaaaaaatcaatggccctgactgactcgatggtagtactactgtagagactagagagggttgctccccatatcttcgtgtgacttttactccagcattgcatttccgtcattgagacgttaattaatagcagctttcgggacagatgactgtggccatgtttcgtcacggccgcttcgtgccagctgggggtactatagtactgtgattttgttagtaaaaactttcattaggccaccattgacgaccgggccttcgcttttgctgcgctaattaaccatttcccggcgaccgaagggaacatgaacatgccccgacacatgagggcatgaggactagtgttctccctgtcgttcgttgacttgactagtgatagtttaaacgctcttcaactggaagagcggttactaccggttcactagctagctgctaatcgagctagttaccctatgaggtgacatgaagcgctcacggttactatgacggttagcttcacgactgttggtggcagtagcgtacgacttagctatagttccggacttacctagctaataacttcgtatagcatacattatacgaagttatggttaccgagctcccctggccgaagcttacactgatagtttaaactgaaggcgggaaacgacaatctgatcatgagcggagaattaagggagtcacgttatgacccccgccgatgacgcgggacaagccgttttacgtttggaactgacagaaccgcaacgattgaaggagccactcagccgcgggtttctggagtttaatgagctaagcacatacgtcagaaaccattattgcgcgttcaaaagtcgcctaaggtcactatcagctagcaaatatttcttgtcaaaaatgctccactgacgttccataaattcccctcggtatccaattagagtctcatattcactcccatggcggccaatgcgggcggcggtggagcgggaggaggcagcggcagcggcagcgtggctgcgccggcggtgtgccgccccagcggctcgcggtggacgccgacgccggagcagatcaggatgctgaaggagctctactacggctgcggcatccggtcgcccagctcggagcagatccagcgcatcaccgccatgctgcggcagcacggcaagatcgagggcaagaacgtcttctactggttccagaaccacaaggcccgcgagcgccagaagcgccgcctcaccagcctcgacgtcaacgtgcccgccgccggcgcggccgacgccaccaccagccaactcggcgtcctctcgctgtcgtcgccgccgccttcaggcgcggcgcctccctcgcccaccctcggcttctacgccgccggcaatggcggcggatcggctgtgctgctggacacgagttccgactggggcagcagcggcgctgctatggccaccgagacatgcttcctgcaggactacatgggcgtgacggacacgggcagctcgtcgcagtggccacgcttctcgtcgtcggacacgataatggcggcggccgcggcgcgggcggcgacgacgcgggcgcccgagacgctccctctcttcccgacctgcggcgacgacggcggcagcggtagcagcagctacttgccgttctggggtgccgcgtccacaactgccggcgccacttcttccgttgcgatccaacagcaacaccagctgcaggagcagtacagcttttacagcaacagcaacagcacccagctggccggcaccggcaaccaagacgtatcggcaacagcagcagcagccgccgccctggagctgagcctcagctcatggtgctccccttaccctgctgcagggagtatgtgagagcaacgcgagctgccactgctcttcactgatgtctctggaatggaaggaggaggaagtgagaacagatcattcgacaaagcagcattagtccgttgatcggtggaagaccactcgtcagtgttgagttgaatgtttgatcaataaaatacggcaatgctgtaagggttgttttttatgccattgataatacactgtactgttcagttgttgaactctatttcttagccatgccaagtgcttttcttattttgaataacattacagcaaaaagttgaaagacaaaaaaaaaacccccgaacagagtgctttgggtcccaagcttctttagactgtgttcggcgttccccctaaatttctccccctatatctcactcacttgtcacatcagcgttctctttccccctatatctccacgctctacagcagttccacctatatcaaacctctataccccaccacaacaatattatatactttcatcttcaactaactcatgtaccttccaatttttttctactaataattatttacgtgcacagaaacttagcaaggagagagagagcgggaatttaaatgctcggcgttaggcttttagtccgctaggtggctagaccgaggttaggacgctagttcactaggggcctagtggtgttttaagacgtcacggtcaccgcggccgcatcgagcagctggcttgtggggaccagacaaaaaaggaatggtgcagaattgttaggcgcacctaccaaaagcatctttgcctttattgcaaagataaagcagattcctctagtacaagtggggaacaaaataacgtggaaaagagctgtcctgacagcccactcactaatgcgtatgacgaacgcagtgacgaccacaaaactcgagcaacgagatcatgagccaatcaaagaggagtgatgtagacctaaagcaataatggagccatgacgtaagggcttacgcccatacgaaataattaaaggctgatgtgacctgtcggtctctcagaacctttactttttatgtttggcgtgtatttttaaatttccacggcaatgacgatgtgaccgtcgacccactaaaacattgctttgtcaaaagctaaaaaagatgatgcccgacagccacttgtgtgaagcatgagaagccggtccctccactaagaaaattagtgaagcatcttccagtggtccctccactcacagctcaatcagtgagcaacaggacgaaggaaatgacgtaagccatgacgtctaatcccattcgaaacgcgtggaccgaagcttgcatgcctgcagtgcagcgtgacccggtcgtgcccctctctagagataatgagcattgcatgtctaagttataaaaaattaccacatattttttttgtcacacttgtttgaagtgcagtttatctatctttatacatatatttaaactttactctacgaataatataatctatagtactacaataatatcagtgttttagagaatcatataaatgaacagttagacatggtctaaaggacaattgagtattttgacaacaggactctacagttttatctttttagtgtgcatgtgttctcctttttttttgcaaatagcttcacctatataatacttcatccattttattagtacatccatttagggtttagggttaatggtttttatagactaatttttttagtacatctattttattctattttagcctctaaattaagaaaactaaaactctattttagtttttttatttaataatttagatataaaatagaataaaataaagtgactaaaaattaaacaaataccctttaagaaattaaaaaaactaaggaaacatttttcttgtttcgagtagataatgccagcctgttaaacgccgtcgacgagtctaacggacaccaaccagcgaaccagcagcgtcgcgtcgggccaagcgaagcagacggcacggcatctctgtcgctgcctctggacccctctcgagagttccgctccaccgttggacttgctccgctgtcggcatccagaaattgcgtggcggagcggcagacgtgagccggcacggcaggcggcctcctcctcctctcacggcaccggcagctacgggggattcctttcccaccgctccttcgctttcccttcctcgcccgccgtaataaatagacaccccctccacaccctctttccccaacctcgtgttgttcggagcgcacacacacacaaccagatctcccccaaatccacccgtcggcacctccgcttcaaggtacgccgctcgtcctcccccccccccctctctaccttctctagatcggcgttccggtccatgcatggttagggcccggtagttctacttctgttcatgtttgtgttagatccgtgtttgtgttagatccgtgctgctagcgttcgtacacggatgcgacctgtacgtcagacacgttctgattgctaacttgccagtgtttctctttggggaatcctgggatggctctagccgttccgcagacgggatcgatttcatgattttttttgtttcgttgcatagggtttggtttgcccttttcctttatttcaatatatgccgtgcacttgtttgtcgggtcatcttttcatgcttttttttgtcttggttgtgatgatgtggtctggttgggcggtcgttctagatcggagtagaattctgtttcaaactacctggtggatttattaattttggatctgtatgtgtgtgccatacatattcatagttacgaattgaagatgatggatggaaatatcgatctaggataggtatacatgttgatgcgggttttactgatgcatatacagagatgctttttgttcgcttggttgtgatgatgtggtgtggttgggcggtcgttcattcgttctagatcggagtagaatactgtttcaaactacctggtgtatttattaattttggaactgtatgtgtgtgtcatacatcttcatagttacgagtttaagatggatggaaatatcgatctaggataggtatacatgttgatgtgggttttactgatgcatatacatgatggcatatgcagcatctattcatatgctctaaccttgagtacctatctattataataaacaagtatgttttataattattttgatcttgatatacttggatgatggcatatgcagcagctatatgtggatttttttagccctgccttcatacgctatttatttgcttggtactgtttcttttgtcgatgctcaccctgttgtttggtgttacttctgcaggtcgactttaacttagcctaggatccatggccactgtgaacaactggctcgctttctccctctccccgcaggagctgccgccctcccagacgacggactccacactcatctcggccgccaccgccgaccatgtctccggcgatgtctgcttcaacatcccccaagattggagcatgaggggatcagagctttcggcgctcgtcgcggagccgaagctggaggacttcctcggcggcatctccttctccgagcagcatcacaaggccaactgcaacatgatacccagcactagcagcacagtttgctacgcgagctcaggtgctagcaccggctaccatcaccagctgtaccaccagcccaccagctcagcgctccacttcgcggactccgtaatggtggcttcctcggccggtgtccacgacggcggtgccatgctcagcgcggccgccgctaacggtgtcgctggcgctgccagtgccaacggcggcggcatcgggctgtccatgattaagaactggctgcggagccaaccggcgcccatgcagccgagggtggcggcggctgagggcgcgcaggggctctctttgtccatgaacatggcggggacgacccaaggcgctgctggcatgccacttctcgctggagagcgcgcacgggcgcccgagagtgtatcgacgtcagcacagggtggagccgtcgtcgtcacggcgccgaaggaggatagcggtggcagcggtgttgccggcgctctagtagccgtgagcacggacacgggtggcagcggcggcgcgtcggctgacaacacggcaaggaagacggtggacacgttcgggcagcgcacgtcgatttaccgtggcgtgacaaggcatagatggactgggagatatgaggcacatctttgggataacagttgcagaagggaagggcaaactcgtaagggtcgtcaagtctatttaggtggctatgataaagaggagaaagctgctagggcttatgatcttgctgctctgaagtactggggtgccacaacaacaacaaattttccagtgagtaactacgaaaaggagctcgaggacatgaagcacatgacaaggcaggagtttgtagcgtctctgagaaggaagagcagtggtttctccagaggtgcatccatttacaggggagtgactaggcatcaccaacatggaagatggcaagcacggattggacgagttgcagggaacaaggatctttacttgggcaccttcagcacccaggaggaggcagcggaggcgtacgacatcgcggcgatcaagttccgcggcctcaacgccgtcaccaacttcgacatgagccgctacgacgtgaagagcatcctggacagcagcgccctccccatcggcagcgccgccaagcgcctcaaggaggccgaggccgcagcgtccgcgcagcaccaccacgccggcgtggtgagctacgacgtcggccgcatcgcctcgcagctcggcgacggcggagccctggcggcggcgtacggcgcgcactaccacggcgccgcctggccgaccatcgcgttccagccgggcgccgccagcacaggcctgtaccacccgtacgcgcagcagccaatgcgcggcggcgggtggtgcaagcaggagcaggaccacgcggtgatcgcggccgcgcacagcctgcaggacctccaccacctgaacctgggcgcggccggcgcgcacgactttttctcggcagggcagcaggccgccgccgctgcgatgcacggcctgggtagcatcgacagtgcgtcgctcgagcacagcaccggctccaactccgtcgtctacaacggcggggtcggcgacagcaacggcgccagcgccgtcggcggcagtggcggtggctacatgatgccgatgagcgctgccggagcaaccactacatcggcaatggtgagccacgagcaggtgcatgcacgggcctacgacgaagccaagcaggctgctcagatggggtacgagagctacctggtgaacgcggagaacaatggtggcggaaggatgtctgcatgggggactgtcgtgtctgcagccgcggcggcagcagcaagcagcaacgacaacatggccgccgacgtcgggcatggcggcgcgcagctcttcagtgtctggaacgacacttaagcgtacctagtggtacctgacatcttatagtctgcaacctctcgtgtctgaattcctatctttatcaagtgttattgcttccacgactataggacagctttcgtcgaaagcttttgctcatgtgatctcgaaggattcatctagtctgatttttcgtgacttgtatcggttttattggattcatccaacatatatcaataaaaaatgagttgtgtttcctttcttcctagttcagttaaaattatttccctcctgcgcttgtgctgtaattgtctgtgtacctgttgtttgtgactgtgttagttcccttggatatgatttcgtatttgatatgtacatggagatagcttagcttcattattggagtatgaagttagtatgacatagtcactctcctggaaaattgacactgcaaaccatatttttattctgaaccacaaatcctagtcagtccgctggcatatgccgtccgtttgctgaatccagaacgtgggtttggagatgtacggctgagatgcctctatgcgaaggggatttcgtggtgaaacgagatgggagtagagcaacgcccgtggaagatgcttcaaacttccacacttttgagcaacgatcggcagtagtaaggtagacgatttcaagatcaaagcatatgaagataaacaacatcaacaacaaaatttgttggggttctatagagagaaacagagctacatacatacactgttttgtatctaccatctgagatgatgaaaagatgaaaaactaaagaatgccccggcgccaacgccaggacacgccgcgcgcgcgtcacccgagccatctcttgacccagccggcgctgtatatttacacacgttgcagcatcgatcaccacctgttcgatcgcgtcgccgtcaccggcgcgccgcgacttattgaactagtctagggcgcggctaacaacctagcttagattgccttgtctaaacccttaggctaacgcgccactctagaaggccgatctccccgggttaccgagctccaccttgctagttggatattacctcttctcttcaaagtatccttgaacgctcaccggttatcaaatctctacactatagctctgtagtcttgctagatagttagttctttagctctctctagaggttcacaaactcaatacaacacacagtggagtagggtattacgctccggcggcccgaaccactctaaatccttgtgtcctcgtgtgctcttccaccattaatgactgtaattgcagggacacgaagagttgtagcgcttttgccaacaagatccgctatatgctagtagagtggaacctgcacagcaacaagcatccaataatctgagaataagaattatgtgtggtgatggttctcatctctgcaactcgccattttcgcgagagaaccaaatccaagttggtgaagatcatgatttgggctcatgggctggcatagtagctattacctttgcaattgtggttcgaatctatccgatattctccttttcagggagagctaatgcttatgcttattgggtattttggtttgacactgcttcacgcccaaaaaaaggcaactatgtctgagttggatatggcccaaaaaaaggcagctatgtctgagttggatatggaagtcttctttcgtttagggtgaagtaagaccaagctcatgagcttattatcttaggtcggaacaaattagttgataggcatggcacatttatcaaattataatgattttaacagaaaagcaacacctctttttcagcagcaccagctttgcaagctgcaattgacactccaagcatagtatttgctccaaactcagcctgcatttcgcacaatatcatatctatttccatttggataaaatatattttccagaaatatgggaacagaatcaagatacagaaaaaagttgtggtagtagtggtaagtggaaacacaagtacagtgaaaagatagcattatttctgaacagtcaaattaaccgaaataagtagtatcacatactgcccctaaattgactacacccaatgtaaagaattgcttgagcatattgagccatcagttgtttgtttgtgtaacggatttgacaatgcagagttcaggagcaaaaaaccgcaaaggagagaaagagggaaaggatctcctagtatcccaccttgtggcgcgccctgtcaagtgcatgatggcctggtcgatctgcgtctgctgctgcggttccatcccaacgagtgcctccgacaccttgtcgttgatcacccgcaccgcgtaggcgacccccctggcgaggaacttccgcctctcggaggccccggccgcgtcggcggcggcgccctcgagcgcgcccacgctagccgtagatgctcggtgcacggccttgttggtgtgcaactcgacctcaacggccggtgcgctacgcccgtcaaggatctggcgcgcccgcaccctcgtgatcacggtgggcgcctcccgcctcatgtggccgacgatgaaaagcgccgggttaggggccttggcgcgcaccgccgtattcagggcctcctcgctcttgcgcgagagcaggtgcttccccaggtactcctgcactgacaaggctgccacagcggtggaatttgtcctcacgacttcgccacgtcgtcctcacctccctggcttcccacgactccgccgtatcgaggtgctcggtgggtcgtcttaatccgaagtccgaactaggaagacgagacagagaggtctgaggaatgggcctcgtttgatgttgagctgaattatttttccagcataagcccaggtcttggtccatgaacaaaattactagaaacccagcccagtactacgatctaaaagagggactgccactggatagctctctctagcattctccacgctccaatacagcggcgtcgtgtctatccgggtctatccgcgaacacgtgagaactctccagaaactgctttctcctccacttcatctctctcgctttccctctataaaaagaccccttctaggaattgagggagacagcaagcaccaagcagcgatccgaagctcaatcaattcactcaaacctcttccccaaatcttcgattagatcttcgttgacaagaagactagaaccgaacctgacatgtccaacctgctcacggttcaccagaaccttccggctcttccagtggacgcgacgtccgatgaagtcaggaagaacctcatggacatgttccgcgacaggcaagcgttcagcgagcacacctggaagatgctgctctccgtctgccgctcctgggctgcatggtgcaagctgaacaacaggaagtggttccccgctgagcccgaggacgtgagggattaccttctgtacctgcaagcgcgaggtttgtttctgcttctacctttgatatatatataataattatcattaattagtagtaatataatatttcaaatatttttttcaaaataaaagaatgtagtatatagcaattgcttttctgtagtttataagtgtgtatattttaatttataacttttctaatatatgaccaaaacatggtgatgcctaggtctggcagtgaagaccatccagcaacaccttggacaactgaacatgcttcacaggcgctccggcctcccgcgccccagcgactcgaacgccgtgagcctcgtcatgcgccgcatcaggaaggaaaacgtcgatgccggcgaaagggcaaagcaggccctcgcgttcgagaggaccgatttcgaccaggtccgcagcctgatggagaacagcgacaggtgccaggacattaggaacctggcgttcctcggaattgcatacaacacgctcctcaggatcgcggaaattgcccgcattcgcgtgaaggacattagccgcaccgacggcggcaggatgcttatccacattggcaggaccaagacgctcgtttccaccgcaggcgtcgaaaaggccctcagcctcggagtgaccaagctcgtcgaacgctggatctccgtgtccggcgtcgcggacgacccaaacaactacctcttctgccgcgtccgcaagaacggggtggctgcccctagcgccaccagccaactcagcacgagggccttggaaggtattttcgaggccacccaccgcctgatctacggcgcgaaggatgacagcggtcaacgctacctcgcatggtccgggcactccgcccgcgttggagctgctagggacatggcccgcgccggtgtttccatccccgaaatcatgcaggcgggtggatggacgaacgtgaacattgtcatgaactacattcgcaaccttgacagcgagacgggcgcaatggttcgcctcctggaagatggtgactgaggtacccaacctagacttgtccatcttctggattggccaacttaattaatgtatgaaataaaaggatgcacacatagtgacatgctaatcactataatgtgggcatcaaagttgtgtgttatgtgtaattactagttatctgaataaaagagaaagagatcatccatatttcttatcctaaatgaatgtcacgtgtctttataattctttgatgaaccagatgcatttcattaaccaaatccatatacatataaatattaatcatatataattaatatcaattgggttagcaaaacaaatctagtctaggtgtgttttgcgatccgatatcgatcaccttgctagttggatattacctcttctcttcaaagtatccttgaacgctcaccggttatcaaatctctacactatagctctgtagtcttgctagatagttagttctttagctctcgggccctggccgaagcttcgtgcgcacgataacttcgtatagcatacattatacgaagttataacagcggaccgggttaccgaattcctgcccttaaggccaattgttcaagattcattcaacaattgaaacatctcccatgattaaatcagtataaggttgctatggtcttgcttgacaaagtttttttttgagggaatttcaactaaatttttgagtgaaactatcaaatactgattttaaaaaatttttataaaaggaagcgcagagataaaaggccatctatgctacaaaagtacccaaaaatgtaatcctaaagtatgaattgcattttttttttgtttggacgaaaggaaaggagtattaccacaagaatgatatcatcttcatatttagatcttttttgggtaaagcttgagattctctaaatatagagaaatcagaagaaaaaaaaaccgtgttttggtggttttgatttctagcctccacaataactttgacggcgtcgacaagtctaacggacaccaagcagcgaaccaccagcgccgagccaagcgaagcagacggccgagacgttgacaccttcggcgcggcatctctcgagagttccgctccggcgctccacctccaccgctggcggtttcttattccgttccgttccgcctcctgctctgctcctctccacaccacacggcacgaaaccgttacggcaccggcagcacccagcacgggagaggggattcctttcccaccgttccttccctttccgccccgccgctataaatagccagccccatccccagcttttttccccaatctcatctcctctctcctgttgttcggagcacacgcacaatccgatcgatccccaaatccccttcgtctctcctcgcgagcctcgtggatcccagcttcaaggtacggcgatcgatcatcccccctccttctctctaccttcttttctctagactacatcggatggcgatccatggttagggcctgctagtttcccttcctgttttgtcgatggctgcgaggcacaatagatctgatggcgttatgacggctaacttgtcatgttgttgcgatttatagtccctttaggagatcagtttaatttctcggatggttcgagatcggtggtccatggttagtaccctaagatccgcgctgttagggttcgtagatggaggcgacctgttctgattgttaacttgtcagtacctgggaaatcctgggatggttctagctcgtccgcagatgagatcgatttcatgatcctctgtatcttgtttcgttgcctaggttccgtctaatctatccgtggtatgatgtagatgttttgatcgtgctaactacgtcttgtaaagttaattgtcaggtcataatttttagcatgcctttttttttgtttggttttgtctaattgggctgtcgttctagatcagagtagaagactgttccaaactacctgctggatttattgaacttggatctgtatgtgtgtcacatatcttcataaattcatgattaagatggattgaaatatcttttatctttttggtatggatagttctatatgttggtgtggctttgttagatgtatacatgcttagatacatgaagcaacgtgctgctactgtttagtaattgctgttcatttgtctaataaacagataaggatatgtatttatgttgctgttggttttgctggtactttgttggatacaaatgcttcaatacagaaaacagcatgctgctacgatttaccatttatctaatcttatcatatgtctaatctaataaacaaacatgcttttaaattatcttcatatgcttggatgatggcatacacagcggctatgtgtggttttttaaatacccagcatcatgggcatgcatgacactgctttaatatgctttttatttgcttgagactgtttcttttgtttatactgaccctttagttcggtgactcttctgcaggtcgactttaacttagcctaggatccatggcccagtccaagcacggcctgaccaaggagatgaccatgaagtaccgcatggagggctgcgtggacggccacaagttcgtgatcaccggcgagggcatcggctaccccttcaagggcaagcaggccatcaacctgtgcgtggtggagggcggccccttgcccttcgccgaggacatcttgtccgccgccttcatgtacggcaaccgcgtgttcaccgagtacccccaggacatcgtcgactacttcaagaactcctgccccgccggctacacctgggaccgctccttcctgttcgaggacggcgccgtgtgcatctgcaacgccgacatcaccgtgagcgtggaggagaactgcatgtaccacgagtccaagttctacggcgtgaacttccccgccgacggccccgtgatgaagaagatgaccgacaactgggagccctcctgcgagaagatcatccccgtgcccaagcagggcatcttgaagggcgacgtgagcatgtacctgctgctgaaggacggtggccgcttgcgctgccagttcgacaccgtgtacaaggccaagtccgtgccccgcaagatgcccgactggcacttcatccagcacaagctgacccgcgaggaccgcagcgacgccaagaaccagaagtggcacctgaccgagcacgccatcgcctccggctccgccttgccctccggactcagatctcgatagggtaccaatggccagttaacagatccagctgctgctgttctagggttcacaagtctgcctatttgtcttccccaatggagctatggttgtctggtctggtccttggtcgtgtcccgtttcattgtgtactatttacctgtaatgtgtatccttaagtctggtttgatggtgtctgaaacgttttgctgtggtagagcagcatggaagaactataatgaataagtgatccctaatcattgtgtccaaattttgcttctgctatacccttttgtgctgtttcttatgttttgcttaaaaatttgatctgacaaacaaatttgtctaaattatgctcttgttctgactgtgtactgtacacatttgtattgctaccggtttggcacatagttttctctttgattgcagatcaaacccttctgattgcagattgcttggctatggctgatgtgctcactgttcttctttagcttgtatattgctgatggtggcttggctacggctgaaaaagttgctgctgcgccgacttggcaactgttgctccagtaatgctttgtcctctcttcctagccgccgacttggcacttggcagctgttgctcctgtaatgcgttgttatctcttatctcttgagatgtactatgattttgaggctgtttgacttgtgccagattgccagtgctgatgctatattatctcaggtttttatgctagtatatgttttactgtgtgctgcctgtgtcgagttacgtaatctattgaaccgctatgcgtgttgatgccctgttgttgcttgccagattgatgcccctgttgcttgcagcttgcaagctgtagtgaaatcctaaaattcgaaaccaaatctattctgaacttttgaagatctgtgatgtccggaagaaaagattcaaacagataaacgggactctccagaatctataaaataaatgatcgacaaacgctttgctttggtaggcttcctagttagttagcggaccgaagcttcggtccgggcctagaaggccagcttcggccgcccctcggtaccctgggatctgcccttactttaacgcctctaaccaacacccctttatctttataaggaacaataaacagaatttgccccactgttctaaatcacctaataatatccccagctaaaaacaataaaggtttcctagaattaagacaagcatgactgttcctccaggagggtttggaacattgttgcagtcttgcagatacgggcgaagggtgagaaacagagcggagggctggaggtgacctcggtagtcgacgccggagttgagcttgacaacgacggggcggcccctgatggacttgaggaagtccgatggcgtcttcaccgtcccgccggcgcccgaggcgggcctgtcgctgccgccgccgccgctgctcatcttgcgcgctgtgcccccggcggtgtccctgtgttgcggatcgcgggtgggccaggtggatgcgagggcgacccgtttggactccggccggagccgccggatccctggtcggtgtcagtgccgtttactctgggccccacgtgtcagtaccgtctgtagatgacaacaacccgtcgtccacagtcatgtccaaaatatcctttcttcttttttttcgattcggatatctatcttccttttttttttccaaaaatcttcttgacgcaccagcgcgcacgtttgtggtaaacgccgacacgtcggtcccacgtcgatagaccccacccaccagtgagtagcgtgtacgtattcgggggtgacggacgtgtcgccgtcgtcttgctagtcccattcccatctgagccacacatctctgaacaaaaaaaaggagggaggcctccacgcacatccccctccgtgccacccgccccaaaccctcgcgccgcctccgagacagccgccgcaaccatggccaccgccgccgccgcgtctaccgcgctcactggcgccactaccgctgcgcccaaggcgaggcgccgggcgcacctcctggccacccgccgcgccctcgccgcgcccatcaggtgctcagcggcgtcacccgccatgccgatggctcccccggccaccccgctccggccgtggggccccaccgagccccgcaagggtgctgacatcctcgtcgagtccctcgagcgctgcggcgtccgcgacgtcttcgcctaccccggcggcgcgtccatggagatccaccaggcactcacccgctcccccgtcatcgccaaccacctcttccgccacgagcaaggggaggcctttgccgcctccggctacgcgcgctcctcgggccgcgtcggcgtctgcatcgccacctccggccccggcgccaccaacctagtctccgcgctcgccgacgcgctgctcgattccgtccccatggtcgccatcacgggacaggtggcgcgacgcatgattggcaccgacgccttccaggagacgcccatcgtcgaggtcacccgctccatcaccaagcacaactacctggtcctcgacgtcgacgacatcccccgcgtcgtgcaggaggctttcttcctcgcctcctctggtcgaccagggccggtgcttgtcgacatccccaaggacatccagcagcagatggcggtgcctgtctgggacaagcccatgagtctgcctgggtacattgcgcgccttcccaagccccctgcgactgagttgcttgagcaggtgctgcgtcttgttggtgaatcgcggcgccctgttctttatgtgggcggtggctgcgcagcatctggtgaggagttgcgacgctttgtggagctgactggaatcccggtcacaactactcttatgggcctcggcaacttccccagcgacgacccactgtctctgcgcatgctaggtatgcatgggacggtgtatgcaaattatgcagtggataaggccgatctgttgcttgcacttggtgtgcggtttgatgatcgcgtgacagggaagattgaggcttttgcaagcagggctaagattgtgcacgttgatattgatccggctgagattggcaagaacaagcagccacatgtgtccatctgtgcagatgttaagcttgctttgcagggcatgaatgctcttcttgaaggaagcacatcaaagaagagctttgactttggctcatggaacgatgagttggatcagcagaagagggaattcccccttgggtataaaacatctaatgaggagatccagccacaatatgctattcaggttcttgatgagctgacgaaaggcgaggccatcatcggcacaggtgttgggcagcaccagatgtgggcggcacagtactacacttacaagcggccaaggcagtggttgtcttcagctggtcttggggctatgggatttggtttgccggctgctgctggtgcttctgtggcaaacccaggtgtcactgttgttgacatcgatggagatggtagctttctcatgaacgttcaggagctagctatgatccgaattgagaacctcccagtgaaggtctttgtgctaaacaaccagcacctggggatggtggtgcagttggaggacaggttctataaggccaacagagcgcacacatacttgggaaacccagagaatgaaagtgagatatatccagatttcgtgacgatcgccaaagggttcaacattccagccgtccgtgtgacaaagaagaacgaagtccgcgcagcgataaagaagatgctcgagactccagggccgtacctcttggatataatcgtcccacaccaggagcatgtgttgcctatgatccctagtggtggggctttcaaggatatgatcctggatggtgatggcaggactgtgtactgacttcgaataggtacccggggatcctctagtgccgtgggtcgtttaagctgccgctgtacctgtgtcgtctggtgccttctggtgtacctgggaggttgtcgtctatcaagtatctgtggttggtgtcatgagtcagtgagtcccaatactgttcgtgtcctgtgtgcattatacccaaaactgttatgggcaaatcatgaataagcttgatgttcgaacttaaaagtctctgctcaatatggtattatggttgtttttgttcgtctcctaatatttgcctgggatcaaattttattggctggtgttcatttgacctccatgttcttgctaggctccattttttactctacagccataatatgtttgattgtttggtttgttctttgttgtacacctggttctgtcgagcttagttttcgacactggcttacagcttaacatgttgctattttattgggttctgattgctattttattgggttctgattgctagtttttgctgaatccaaaaaccatgttatttatttaagcgatccaggttattattatgatggtggctaagtttttttttttccaagggtaaattttctggattctccagtgtttctgtggccgaattcaatcactagagtcgacctgcaaagcttcggtccgggcctagaaggcccgcgccacttacgcttgattccgatgacttcgtaggttcctagctcaagccgctcgtgtccaagcgtcacttacgattagctaatgattacggcatctaggaccgactagttcttatgtgcttctagtctccaaatgtggttgatagttattttgctctaagatcaacagtaatgaagtataaatcatcgttgtggtgtgctactcggttaattgagcattaacacacacaaacatgacgaggatggtataatctccaaaaatgtgtactttgttaggtgggaccctatagccttgattaatgtgctatgttaggcatgcctggaaacgtgtgacgcatatgttttgtgaacctgttgatattatatgtgcttttatattaccatattttattaaaatactaatatttattactagtaagatataacattctatctagcttaaaaactaaccataaatattccataataactagatttaccaaactaatatactaaatatacataataaatacaaaattaacaagacaataatcaatatttatgagcttaatatatttagacattatggttggtcgacgataatcatgctaacttttcgtaattgcttgattgaaatatgcttagaataatgcctctttgttctacatggcaaatagggaccattatggtgtaacaccctgggaaccacaaacaccccgaaatgctactaaactacacaactaaccttcatatataaaatttcgacagcatctcctttgaaaatttgcatagacgtggaagcaacagagtataaacagatctgcgtttaaacgtgcaagcgctactagacaattcagtacattaaaaacgtccgcaatgtgttattaagttgtctaagcgtcaatttgtttacaccacaatatatcctgcca

SEQ ID NO: 153 - DNA, 21414 bp, unidentified
  source 1..21414: mol_type = other DNA; note = Artificial
gtttacccgccaatatatcctgtcaaacactgcggccgcacttgaccgcggatggagccggagctgtggtgaggccatcgacgggaggtgggggagaacacagtctcagtgttctttgtgagtccgcaaggtttttagcttttctgtattaattaaggttgctgttggctgtagaatacggtcgtggaagagctgtatcggtagctactacgtaagctattatatactggaagtctggagctcgtcgatctccggtcgtcttcctccatttctcctcgtcttgctttgactgctgctaccatttgcttctgttttctgatgaagcatgccatgtcggccaccagtgtttgtgtggtttttgcagggaatggctttcaagtgctgtgattgaatggccctcgtcgtcctcggctgagctcacatggacgcgtcatgtgagtgagatatatgatcatatgatgagtggggttcgggtgagtgcgtacttgaagtaggatcccgctttcactcattcattcattggcctttaaaccgggaaattttcgcgaggagatggagggaagcaagcagggtgacgagtgcagagtgccgcgagcgctttgtcaaaaggcaccgccgtaggcaaaaaaatcaatggccctgactgactcgatggtagtactactgtagagactagagagggttgctccccatatcttcgtgtgacttttactccagcattgcatttccgtcattgagacgttaattaatagcagctttcgggacagatgactgtggccatgtttcgtcacggccgcttcgtgccagctgggggtactatagtactgtgattttgttagtaaaaactttcattaggccaccattgacgaccgggccttcgcttttgctgcgctaattaaccatttcccggcgaccgaagggaacatgaacatgccccgacacatgagggcatgaggactagtgttctccctgtcgttcgttgacttgactagtgatagtttaaacgctcttcaactggaagagcggttactaccggttcactagctagctgctaatcgagctagttaccctatgaggtgacatgaagcgctcacggttactatgacggttagcttcacgactgttggtggcagtagcgtacgacttagctatagttccggacttacctagctaataacttcgtatagcatacattatacgaagttatggttaccgccctggccgaagctttccggacttacccttaagcgatttaaatcctgaggcctgcaacactgatagtttaaactgaaggcgggaaacgacaatctgatcatgagcggagaattaagggagtcacgttatgacccccgccgatgacgcgggacaagccgttttacgtttggaactgacagaaccgcaacgattgaaggagccactcagccgcgggtttctggagtttaatgagctaagcacatacgtcagaaaccattattgcgcgttcaaaagtcgcctaaggtcactatcagctagcaaatatttcttgtcaaaaatgctccactgacgttccataaattcccctcggtatccaattagagtctcatattcactcccatggcggccaatgcgggcggcggtggagcgggaggaggcagcggcagcggcagcgtggctgcgccggcggtgtgccgccccagcggctcgcggtggacgccgacgccggagcagatcaggatgctgaaggagctctactacggctgcggcatccggtcgcccagctcggagcagatccagcgcatcaccgccatgctgcggcagcacggcaagatcgagggcaagaacgtcttctactggttccagaaccacaaggcccgcgagcgccagaagcgccgcctcaccagcctcgacgtcaacgtgcccgccgccggcgcggccgacgccaccaccagccaactcggcgtcctctcgctgtcgtcgccgccgccttcaggcgcggcgcctccctcgcccaccctcggcttctacgccgccggcaatggcggcggatcggctgtgctgctggacacgagttccgactggggcagcagcggcgctgctatggccaccgagacatgcttcctgcaggactacatgggcgtgacggacacgggcagctcgtcgcagtggccacgcttctcgtcgtcggacacgataatggcggcggccgcggcgcgggcggcgacgacgcgggcgcccgagacgctccctctcttcccgacctgcggcgacgacggcggcagcggtagcagcagctacttgccgttctggggtgccgcgtccacaactgccggcgccacttcttccgttgcgatccaacagcaacaccagctgcaggagcagtacagcttttacagcaacagcaacagcacccagctggccggcaccggcaaccaagacgtatcggcaacagcagcagcagccgccgccctggagctgagcctcagctcatggtgctccccttaccctgctgcagggagtatgtgagagcaacgcgagctgccactgctcttcactgatgtctctggaatggaaggaggaggaagtgagaacagatcattcgacaaagcagcattagtccgttgatcggtggaagaccactcgtcagtgttgagttgaatgtttgatcaataaaatacggcaatgctgtaagggttgttttttatgccattgataatacactgtactgttcagttgttgaactctatttcttagccatgccaagtgcttttcttattttgaataacattacagcaaaaagttgaaagacaaaaaaaaaaacccccgaacagagtgctttgggtcccaagcttctttagactgtgttcggcgttccccctaaatttctccccctatatctcactcacttgtcacatcagcgttctctttccccctatatctccacgctctacagcagttccacctatatcaaacctctataccccaccacaacaatattatatactttcatcttcaactaactcatgtaccttccaatttttttctactaataattatttacgtgcacagaaacttagcaaggagagagagagcgggaatttaaatgctcggcgttaggcttttagtccgctaggtggctagaccgaggttaggacgctagttcactaggggcctagtggtgttttaagacgtcacggtcaccgcggccgcatcgagcagctggcttgtggggaccagacaaaaaaggaatggtgcagaattgttaggcgcacctaccaaaagcatctttgcctttattgcaaagataaagcagattcctctagtacaagtggggaacaaaataacgtggaaaagagctgtcctgacagcccactcactaatgcgtatgacgaacgcagtgacgaccacaaaactcgagcaacgagatcatgagccaatcaaagaggagtgatgtagacctaaagcaataatggagccatgacgtaagggcttacgcccatacgaaataattaaaggctgatgtgacctgtcggtctctcagaacctttactttttatgtttggcgtgtatttttaaatttccacggcaatgacgatgtgaccgtcgacccactaaaacattgctttgtcaaaagctaaaaaagatgatgcccgacagccacttgtgtgaagcatgagaagccggtccctccactaagaaaattagtgaagcatcttccagtggtccctccactcacagctcaatcagtgagcaacaggacgaaggaaatgacgtaagccatgacgtctaatcccattcgaaacgcgtggaccgaagcttgcatgcctgcagtgcagcgtgacccggtcgtgcccctctctagagataatgagcattgcatgtctaagttataaaaaattaccacatattttttttgtcacacttgtttgaagtgcagtttatctatctttatacatatatttaaactttactctacgaataatataatctatagtactacaataatatcagtgttttagagaatcatataaatgaacagttagacatggtctaaaggacaattgagtattttgacaacaggactctacagttttatctttttagtgtgcatgtgttctcctttttttttgcaaatagcttcacctatataatacttcatccattttattagtacatccatttagggtttagggttaatggtttttatagactaatttttttagtacatctattttattctattttagcctctaaattaagaaaactaaaactctattttagtttttttatttaataatttagatataaaatagaataaaataaagtgactaaaaattaaacaaataccctttaagaaattaaaaaaactaaggaaacatttttcttgtttcgagtagataatgccagcctgttaaacgccgtcgacgagtctaacggacaccaaccagcgaaccagcagcgtcgcgtcgggccaagcgaagcagacggcacggcatctctgtcgctgcctctggacccctctcgagagttccgctccaccgttggacttgctccgctgtcggcatccagaaattgcgtggcggagcggcagacgtgagccggcacggcaggcggcctcctcctcctctcacggcaccggcagctacgggggattcctttcccaccgctccttcgctttcccttcctcgcccgccgtaataaatagacaccccctccacaccctctttccccaacctcgtgttgttcggagcgcacacacacacaaccagatctcccccaaatccacccgtcggcacctccgcttcaaggtacgccgctcgtcctcccccccccccctctctaccttctctagatcggcgttccggtccatgcatggttagggcccggtagttctacttctgttcatgtttgtgttagatccgtgtttgtgttagatccgtgctgctagcgttcgtacacggatgcgacctgtacgtcagacacgttctgattgctaacttgccagtgtttctctttggggaatcctgggatggctctagccgttccgcagacgggatcgatttcatgattttttttgtttcgttgcatagggtttggtttgcccttttcctttatttcaatatatgccgtgcacttgtttgtcgggtcatcttttcatgcttttttttgtcttggttgtgatgatgtggtctggttgggcggtcgttctagatcggagtagaattctgtttcaaactacctggtggatttattaattttggatctgtatgtgtgtgccatacatattcatagttacgaattgaagatgatggatggaaatatcgatctaggataggtatacatgttgatgcgggttttactgatgcatatacagagatgctttttgttcgcttggttgtgatgatgtggtgtggttgggcggtcgttcattcgttctagatcggagtagaatactgtttcaaactacctggtgtatttattaattttggaactgtatgtgtgtgtcatacatcttcatagttacgagtttaagatggatggaaatatcgatctaggataggtatacatgttgatgtgggttttactgatgcatatacatgatggcatatgcagcatctattcatatgctctaaccttgagtacctatctattataataaacaagtatgttttataattattttgatcttgatatacttggatgatggcatatgcagcagctatatgtggatttttttagccctgccttcatacgctatttatttgcttggtactgtttcttttgtcgatgctcaccctgttgtttggtgttacttctgcaggtcgactttaacttagcctaggatccatggccactgtgaacaactggctcgctttctccctctccccgcaggagctgccgccctcccagacgacggactccacactcatctcggccgccaccgccgaccatgtctccggcgatgtctgcttcaacatcccccaagattggagcatgaggggatcagagctttcggcgctcgtcgcggagccgaagctggaggacttcctcggcggcatctccttctccgagcagcatcacaaggccaactgcaacatgatacccagcactagcagcacagtttgctacgcgagctcaggtgctagcaccggctaccatcaccagctgtaccaccagcccaccagctcagcgctccacttcgcggactccgtaatggtggcttcctcggccggtgtccacgacggcggtgccatgctcagcgcggccgccgctaacggtgtcgctggcgctgccagtgccaacggcggcggcatcgggctgtccatgattaagaactggctgcggagccaaccggcgcccatgcagccgagggtggcggcggctgagggcgcgcaggggctctctttgtccatgaacatggcggggacgacccaaggcgctgctggcatgccacttctcgctggagagcgcgcacgggcgcccgagagtgtatcgacgtcagcacagggtggagccgtcgtcgtcacggcgccgaaggaggatagcggtggcagcggtgttgccggcgctctagtagccgtgagcacggacacgggtggcagcggcggcgcgtcggctgacaacacggcaaggaagacggtggacacgttcgggcagcgcacgtcgatttaccgtggcgtgacaaggcatagatggactgggagatatgaggcacatctttgggataacagttgcagaagggaagggcaaactcgtaagggtcgtcaagtctatttaggtggctatgataaagaggagaaagctgctagggcttatgatcttgctgctctgaagtactggggtgccacaacaacaacaaattttccagtgagtaactacgaaaaggagctcgaggacatgaagcacatgacaaggcaggagtttgtagcgtctctgagaaggaagagcagtggtttctccagaggtgcatccatttacaggggagtgactaggcatcaccaacatggaagatggcaagcacggattggacgagttgcagggaacaaggatctttacttgggcaccttcagcacccaggaggaggcagcggaggcgtacgacatcgcggcgatcaagttccgcggcctcaacgccgtcaccaacttcgacatgagccgctacgacgtgaagagcatcctggacagcagcgccctccccatcggcagcgccgccaagcgcctcaaggaggccgaggccgcagcgtccgcgcagcaccaccacgccggcgtggtgagctacgacgtcggccgcatcgcctcgcagctcggcgacggcggagccctggcggcggcgtacggcgcgcactaccacggcgccgcctggccgaccatcgcgttccagccgggcgccgccagcacaggcctgtaccacccgtacgcgcagcagccaatgcgcggcggcgggtggtgcaagcaggagcaggaccacgcggtgatcgcggccgcgcacagcctgcaggacctccaccacctgaacctgggcgcggccggcgcgcacgactttttctcggcagggcagcaggccgccgccgctgcgatgcacggcctgggtagcatcgacagtgcgtcgctcgagcacagcaccggctccaactccgtcgtctacaacggcggggtcggcgacagcaacggcgccagcgccgtcggcggcagtggcggtggctacatgatgccgatgagcgctgccggagcaaccactacatcggcaatggtgagccacgagcaggtgcatgcacgggcctacgacgaagccaagcaggctgctcagatggggtacgagagctacctggtgaacgcggagaacaatggtggcggaaggatgtctgcatgggggactgtcgtgtctgcagccgcggcggcagcagcaagcagcaacgacaacatggccgccgacgtcgggcatggcggcgcgcagctcttcagtgtctggaacgacacttaagcgtacctagtggtacctgacatcttatagtctgcaacctctcgtgtctgaattcctatctttatcaagtgttattgcttccacgactataggacagctttcgtcgaaagcttttgctcatgtgatctcgaaggattcatctagtctgatttttcgtgacttgtatcggttttattggattcatccaacatatatcaataaaaaatgagttgtgtttcctttcttcctagttcagttaaaattatttccctcctgcgcttgtgctgtaattgtctgtgtacctgttgtttgtgactgtgttagttcccttggatatgatttcgtatttgatatgtacatggagatagcttagcttcattattggagtatgaagttagtatgacatagtcactctcctggaaaattgacactgcaaaccatatttttattctgaaccacaaatcctagtcagtccgctggcatatgccgtccgtttgctgaatccagaacgtgggtttggagatgtacggctgagatgcctctatgcgaaggggatttcgtggtgaaacgagatgggagtagagcaacgcccgtggaagatgcttcaaacttccacacttttgagcaacgatcggcagtagtaaggtagacgatttcaagatcaaagcatatgaagataaacaacatcaacaacaaaatttgttggggttctatagagagaaacagagctacatacatacactgttttgtatctaccatctgagatgatgaaaagatgaaaaactaaagaatgccccggcgccaacgccaggacacgccgcgcgcgcgtcacccgagccatctcttgacccagccggcgctgtatatttacacacgttgcagcatcgatcaccacctgttcgatcgcgtcgccgtcaccggcgcgccgcgacttattgaactagtctagggcgcggctaacaacctagcttagattgccttgtctaaacccttaggctaacgcgccactctagaaggccgatctcccccgaacgcgccagatccgatatcgatgggccctggccgaagcttggtcacccggtccgggcctagaaggccgatctcccgggcacccagctttcttgtacaaagtggccgttaacggatcggccagaatggcccggaccgggttaccccgcggcaatcatagatgacttggtggaatcaaacacataattgagcaaatgatatggacattaaactgaaagttagtctgtctaatggtacaactcgggttctccgattaaaattttgtcattaaaagtttgtgttgtatacttgtatgatttaaaagtttaaaagtttgaatggtacaaaacttgattttgtcataaacttgtatgatttaaaagtttaatggtacaaatgatatggacatttaaaagtttgtgttgtatacttgtatgatttaaaaaataataataataataataataataatatatatatatatatctacttgtatgatttgtatagatgtggctgtctattttttctccaccgttaactcatgtaatatatataaaaaacaaatttatacttttttgtgaaggtcttttttaaataataaaaacaaatttgggtagggaggtctatttaaaataatatggtcgcaatatttaacaatttttaaattgccaagaattcgagctcggtaccctggttcacaaactcaatacaacacacagtggagtagggtattacgctccggcggcccgaaccactctaaatccttgtgtcctcgtgtgctcttccaccattaatgactgtaattgcagggacacgaagagttgtagcgcttttgccaacaagatccgctatatgctagtagagtggaacctgcacagcaacaagcatccaataatctgagaataagaattatgtgtggtgatggttctcatctctgcaactcgccattttcgcgagagaaccaaatccaagttggtgaagatcatgatttgggctcatgggctggcatagtagctattacctttgcaattgtggttcgaatctatccgatattctccttttcagggagagctaatgcttatgcttattgggtattttggtttgacactgcttcacgcccaaaaaaaggcaactatgtctgagttggatatggcccaaaaaaaggcagctatgtctgagttggatatggaagtcttctttcgtttagggtgaagtaagaccaagctcatgagcttattatcttaggtcggaacaaattagttgataggcatggcacatttatcaaattataatgattttaacagaaaagcaacacctctttttcagcagcaccagctttgcaagctgcaattgacactccaagcatagtatttgctccaaactcagcctgcatttcgcacaatatcatatctatttccatttggataaaatatattttccagaaatatgggaacagaatcaagatacagaaaaaagttgtggtagtagtggtaagtggaaacacaagtacagtgaaaagatagcattatttctgaacagtcaaattaaccgaaataagtagtatcacatactgcccctaaattgactacacccaatgtaaagaattgcttgagcatattgagccatcagttgtttgtttgtgtaacggatttgacaatgcagagttcaggagcaaaaaaccgcaaaggagagaaagagggaaaggatctcctagtatcccaccttgtggcgcgccctgtcaagtgcatgatggcctggtcgatctgcgtctgctgctgcggttccatcccaacgagtgcctccgacaccttgtcgttgatcacccgcaccgcgtaggcgacccccctggcgaggaacttccgcctctcggaggccccggccgcgtcggcggcggcgccctcgagcgcgcccacgctagccgtagatgctcggtgcacggccttgttggtgtgcaactcgacctcaacggccggtgcgctacgcccgtcaaggatctggcgcgcccgcaccctcgtgatcacggtgggcgcctcccgcctcatgtggccgacgatgaaaagcgccgggttaggggccttggcgcgcaccgccgtattcagggcctcctcgctcttgcgcgagagcaggtgcttccccaggtactcctgcactgacaaggctgccacagcggtggaatttgtcctcacgacttcgccacgtcgtcctcacctccctggcttcccacgactccgccgtatcgaggtgctcggtgggtcgtcttaatccgaagtccgaactaggaagacgagacagagaggtctgaggaatgggcctcgtttgatgttgagctgaattatttttccagcataagcccaggtcttggtccatgaacaaaattactagaaacccagcccagtactacgatctaaaagagggactgccactggatagctctctctagcattctccacgctccaatacagcggcgtcgtgtctatccgggtctatccgcgaacacgtgagaactctccagaaactgctttctcctccacttcatctctctcgctttccctctataaaaagaccccttctaggaattgagggagacagcaagcaccaagcagcgatccgaagctcaatcaattcactcaaacctcttccccaaatcttcgattagatcttcgttgacaagaagactagaaccgaacctgacatgtccaacctgctcacggttcaccagaaccttccggctcttccagtggacgcgacgtccgatgaagtcaggaagaacctcatggacatgttccgcgacaggcaagcgttcagcgagcacacctggaagatgctgctctccgtctgccgctcctgggctgcatggtgcaagctgaacaacaggaagtggttccccgctgagcccgaggacgtgagggattaccttctgtacctgcaagcgcgaggtttgtttctgcttctacctttgatatatatataataattatcattaattagtagtaatataatatttcaaatatttttttcaaaataaaagaatgtagtatatagcaattgcttttctgtagtttataagtgtgtatattttaatttataacttttctaatatatgaccaaaacatggtgatgcctaggtctggcagtgaagaccatccagcaacaccttggacaactgaacatgcttcacaggcgctccggcctcccgcgccccagcgactcgaacgccgtgagcctcgtcatgcgccgcatcaggaaggaaaacgtcgatgccggcgaaagggcaaagcaggccctcgcgttcgagaggaccgatttcgaccaggtccgcagcctgatggagaacagcgacaggtgccaggacattaggaacctggcgttcctcggaattgcatacaacacgctcctcaggatcgcggaaattgcccgcattcgcgtgaaggacattagccgcaccgacggcggcaggatgcttatccacattggcaggaccaagacgctcgtttccaccgcaggcgtcgaaaaggccctcagcctcggagtgaccaagctcgtcgaacgctggatctccgtgtccggcgtcgcggacgacccaaacaactacctcttctgccgcgtccgcaagaacggggtggctgcccctagcgccaccagccaactcagcacgagggccttggaaggtattttcgaggccacccaccgcctgatctacggcgcgaaggatgacagcggtcaacgctacctcgcatggtccgggcactccgcccgcgttggagctgctagggacatggcccgcgccggtgtttccatccccgaaatcatgcaggcgggtggatggacgaacgtgaacattgtcatgaactacattcgcaaccttgacagcgagacgggcgcaatggttcgcctcctggaagatggtgactgaggtacccaacctagacttgtccatcttctggattggccaacttaattaatgtatgaaataaaaggatgcacacatagtgacatgctaatcactataatgtgggcatcaaagttgtgtgttatgtgtaattactagttatctgaataaaagagaaagagatcatccatatttcttatcctaaatgaatgtcacgtgtctttataattctttgatgaaccagatgcatttcattaaccaaatccatatacatataaatattaatcatatataattaatatcaattgggttagcaaaacaaatctagtctaggtgtgttttgcgatccgataatcgatgggtctaaaaacggcccctaactaacgcttagttgcccgctagattagtcccccgttagtgcctagttagacacacgacgaactaggggctagcacgcgttagataacttcgtatagcatacattatacgaagttattccggaccgggttaccgaattcaattcctgcccttaaggccaattgttcaagattcattcaacaattgaaacatctcccatgattaaatcagtataaggttgctatggtcttgcttgacaaagtttttttttgagggaatttcaactaaatttttgagtgaaactatcaaatactgattttaaaaaatttttataaaaggaagcgcagagataaaaggccatctatgctacaaaagtacccaaaaatgtaatcctaaagtatgaattgcattttttttttgtttggacgaaaggaaaggagtattaccacaagaatgatatcatcttcatatttagatcttttttgggtaaagcttgagattctctaaatatagagaaatcagaagaaaaaaaaaccgtgttttggtggttttgatttctagcctccacaataactttgacggcgtcgacaagtctaacggacaccaagcagcgaaccaccagcgccgagccaagcgaagcagacggccgagacgttgacaccttcggcgcggcatctctcgagagttccgctccggcgctccacctccaccgctggcggtttcttattccgttccgttccgcctcctgctctgctcctctccacaccacacggcacgaaaccgttacggcaccggcagcacccagcacgggagaggggattcctttcccaccgttccttccctttccgccccgccgctataaatagccagccccatccccagcttttttccccaatctcatctcctctctcctgttgttcggagcacacgcacaatccgatcgatccccaaatccccttcgtctctcctcgcgagcctcgtggatcccagcttcaaggtacggcgatcgatcatcccccctccttctctctaccttcttttctctagactacatcggatggcgatccatggttagggcctgctagtttcccttcctgttttgtcgatggctgcgaggcacaatagatctgatggcgttatgacggctaacttgtcatgttgttgcgatttatagtccctttaggagatcagtttaatttctcggatggttcgagatcggtggtccatggttagtaccctaagatccgcgctgttagggttcgtagatggaggcgacctgttctgattgttaacttgtcagtacctgggaaatcctgggatggttctagctcgtccgcagatgagatcgatttcatgatcctctgtatcttgtttcgttgcctaggttccgtctaatctatccgtggtatgatgtagatgttttgatcgtgctaactacgtcttgtaaagttaattgtcaggtcataatttttagcatgcctttttttttgtttggttttgtctaattgggctgtcgttctagatcagagtagaagactgttccaaactacctgctggatttattgaacttggatctgtatgtgtgtcacatatcttcataaattcatgattaagatggattgaaatatcttttatctttttggtatggatagttctatatgttggtgtggctttgttagatgtatacatgcttagatacatgaagcaacgtgctgctactgtttagtaattgctgttcatttgtctaataaacagataaggatatgtatttatgttgctgttggttttgctggtactttgttggatacaaatgcttcaatacagaaaacagcatgctgctacgatttaccatttatctaatcttatcatatgtctaatctaataaacaaacatgcttttaaattatcttcatatgcttggatgatggcatacacagcggctatgtgtggttttttaaatacccagcatcatgggcatgcatgacactgctttaatatgctttttatttgcttgagactgtttcttttgtttatactgaccctttagttcggtgactcttctgcaggtcgactttaacttagcctaggatccatggcccagtccaagcacggcctgaccaaggagatgaccatgaagtaccgcatggagggctgcgtggacggccacaagttcgtgatcaccggcgagggcatcggctaccccttcaagggcaagcaggccatcaacctgtgcgtggtggagggcggccccttgcccttcgccgaggacatcttgtccgccgccttcatgtacggcaaccgcgtgttcaccgagtacccccaggacatcgtcgactacttcaagaactcctgccccgccggctacacctgggaccgctccttcctgttcgaggacggcgccgtgtgcatctgcaacgccgacatcaccgtgagcgtggaggagaactgcatgtaccacgagtccaagttctacggcgtgaacttccccgccgacggccccgtgatgaagaagatgaccgacaactgggagccctcctgcgagaagatcatccccgtgcccaagcagggcatcttgaagggcgacgtgagcatgtacctgctgctgaaggacggtggccgcttgcgctgccagttcgacaccgtgtacaaggccaagtccgtgccccgcaagatgcccgactggcacttcatccagcacaagctgacccgcgaggaccgcagcgacgccaagaaccagaagtggcacctgaccgagcacgccatcgcctccggctccgccttgccctccggactcagatctcgatagggtaccaatggccagttaacagatccagctgctgctgttctagggttcacaagtctgcctatttgtcttccccaatggagctatggttgtctggtctggtccttggtcgtgtcccgtttcattgtgtactatttacctgtaatgtgtatccttaagtctggtttgatggtgtctgaaacgttttgctgtggtagagcagcatggaagaactataatgaataagtgatccctaatcattgtgtccaaattttgcttctgctatacccttttgtgctgtttcttatgttttgcttaaaaatttgatctgacaaacaaatttgtctaaattatgctcttgttctgactgtgtactgtacacatttgtattgctaccggtttggcacatagttttctctttgattgcagatcaaacccttctgattgcagattgcttggctatggctgatgtgctcactgttcttctttagcttgtatattgctgatggtggcttggctacggctgaaaaagttgctgctgcgccgacttggcaactgttgctccagtaatgctttgtcctctcttcctagccgccgacttggcacttggcagctgttgctcctgtaatgcgttgttatctcttatctcttgagatgtactatgattttgaggctgtttgacttgtgccagattgccagtgctgatgctatattatctcaggtttttatgctagtatatgttttactgtgtgctgcctgtgtcgagttacgtaatctattgaaccgctatgcgtgttgatgccctgttgttgcttgccagattgatgcccctgttgcttgcagcttgcaagctgtagtgaaatcctaaaattcgaaaccaaatctattctgaacttttgaagatctgtgatgtccggaagaaaagattcaaacagataaacgggactctccagaatctataaaataaatgatcgacaaacgctttgctttggtaggcttcctagttagttagcggaccgaagcttcggtccgggcctagaaggccagcttcggccgcccctcggtaccctgggatctgcccttactttaacgcctctaaccaacacccctttatctttataaggaacaataaacagaatttgccccactgttctaaatcacctaataatatccccagctaaaaacaataaaggtttcctagaattaagacaagcatgactgttcctccaggagggtttggaacattgttgcagtcttgcagatacgggcgaagggtgagaaacagagcggagggctggaggtgacctcggtagtcgacgccggagttgagcttgacaacgacggggcggcccctgatggacttgaggaagtccgatggcgtcttcaccgtcccgccggcgcccgaggcgggcctgtcgctgccgccgccgccgctgctcatcttgcgcgctgtgcccccggcggtgtccctgtgttgcggatcgcgggtgggccaggtggatgcgagggcgacccgtttggactccggccggagccgccggatccctggtcggtgtcagtgccgtttactctgggccccacgtgtcagtaccgtctgtagatgacaacaacccgtcgtccacagtcatgtccaaaatatcctttcttcttttttttcgattcggatatctatcttccttttttttttccaaaaatcttcttgacgcaccagcgcgcacgtttgtggtaaacgccgacacgtcggtcccacgtcgatagaccccacccaccagtgagtagcgtgtacgtattcgggggtgacggacgtgtcgccgtcgtcttgctagtcccattcccatctgagccacacatctctgaacaaaaaaaaggagggaggcctccacgcacatccccctccgtgccacccgccccaaaccctcgcgccgcctccgagacagccgccgcaaccatggccaccgccgccgccgcgtctaccgcgctcactggcgccactaccgctgcgcccaaggcgaggcgccgggcgcacctcctggccacccgccgcgccctcgccgcgcccatcaggtgctcagcggcgtcacccgccatgccgatggctcccccggccaccccgctccggccgtggggccccaccgagccccgcaagggtgctgacatcctcgtcgagtccctcgagcgctgcggcgtccgcgacgtcttcgcctaccccggcggcgcgtccatggagatccaccaggcactcacccgctcccccgtcatcgccaaccacctcttccgccacgagcaaggggaggcctttgccgcctccggctacgcgcgctcctcgggccgcgtcggcgtctgcatcgccacctccggccccggcgccaccaacctagtctccgcgctcgccgacgcgctgctcgattccgtccccatggtcgccatcacgggacaggtggcgcgacgcatgattggcaccgacgccttccaggagacgcccatcgtcgaggtcacccgctccatcaccaagcacaactacctggtcctcgacgtcgacgacatcccccgcgtcgtgcaggaggctttcttcctcgcctcctctggtcgaccagggccggtgcttgtcgacatccccaaggacatccagcagcagatggcggtgcctgtctgggacaagcccatgagtctgcctgggtacattgcgcgccttcccaagccccctgcgactgagttgcttgagcaggtgctgcgtcttgttggtgaatcgcggcgccctgttctttatgtgggcggtggctgcgcagcatctggtgaggagttgcgacgctttgtggagctgactggaatcccggtcacaactactcttatgggcctcggcaacttccccagcgacgacccactgtctctgcgcatgctaggtatgcatgggacggtgtatgcaaattatgcagtggataaggccgatctgttgcttgcacttggtgtgcggtttgatgatcgcgtgacagggaagattgaggcttttgcaagcagggctaagattgtgcacgttgatattgatccggctgagattggcaagaacaagcagccacatgtgtccatctgtgcagatgttaagcttgctttgcagggcatgaatgctcttcttgaaggaagcacatcaaagaagagctttgactttggctcatggaacgatgagttggatcagcagaagagggaattcccccttgggtataaaacatctaatgaggagatccagccacaatatgctattcaggttcttgatgagctgacgaaaggcgaggccatcatcggcacaggtgttgggcagcaccagatgtgggcggcacagtactacacttacaagcggccaaggcagtggttgtcttcagctggtcttggggctatgggatttggtttgccggctgctgctggtgcttctgtggcaaacccaggtgtcactgttgttgacatcgatggagatggtagctttctcatgaacgttcaggagctagctatgatccgaattgagaacctcccagtgaaggtctttgtgctaaacaaccagcacctggggatggtggtgcagttggaggacaggttctataaggccaacagagcgcacacatacttgggaaacccagagaatgaaagtgagatatatccagatttcgtgacgatcgccaaagggttcaacattccagccgtccgtgtgacaaagaagaacgaagtccgcgcagcgataaagaagatgctcgagactccagggccgtacctcttggatataatcgtcccacaccaggagcatgtgttgcctatgatccctagtggtggggctttcaaggatatgatcctggatggtgatggcaggactgtgtactgacttcgaataggtacccggggatcctctagtgccgtgggtcgtttaagctgccgctgtacctgtgtcgtctggtgccttctggtgtacctgggaggttgtcgtctatcaagtatctgtggttggtgtcatgagtcagtgagtcccaatactgttcgtgtcctgtgtgcattatacccaaaactgttatgggcaaatcatgaataagcttgatgttcgaacttaaaagtctctgctcaatatggtattatggttgtttttgttcgtctcctaatatttgcctgggatcaaattttattggctggtgttcatttgacctccatgttcttgctaggctccattttttactctacagccataatatgtttgattgtttggtttgttctttgttgtacacctggttctgtcgagcttagttttcgacactggcttacagcttaacatgttgctattttattgggttctgattgctattttattgggttctgattgctagtttttgctgaatccaaaaaccatgttatttatttaagcgatccaggttattattatgatggtggctaagtttttttttttccaagggtaaattttctggattctccagtgtttctgtggccgaattcaatcactagagtcgacctgcaaagcttcggtccgggcctagaaggcccgcgccacttacgcttgattccgatgacttcgtaggttcctagctcaagccgctcgtgtccaagcgtcacttacgattagctaatgattacggcatctaggaccgactagttcttatgtgcttctagtctccaaatgtggttgatagttattttgctctaagatcaacagtaatgaagtataaatcatcgttgtggtgtgctactcggttaattgagcattaacacacacaaacatgacgaggatggtataatctccaaaaatgtgtactttgttaggtgggaccctatagccttgattaatgtgctatgttaggcatgcctggaaacgtgtgacgcatatgttttgtgaacctgttgatattatatgtgcttttatattaccatattttattaaaatactaatatttattactagtaagatataacattctatctagcttaaaaactaaccataaatattccataataactagatttaccaaactaatatactaaatatacataataaatacaaaattaacaagacaataatcaatatttatgagcttaatatatttagacattatggttggtcgacgataatcatgctaacttttcgtaattgcttgattgaaatatgcttagaataatgcctctttgttctacatggcaaatagggaccattatggtgtaacaccctgggaaccacaaacaccccgaaatgctactaaactacacaactaaccttcatatataaaatttcgacagcatctcctttgaaaatttgcatagacgtggaagcaacagagtataaacagatctgcgtttaaacgtgcaagcgctactagacaattcagtacattaaaaacgtccgcaatgtgttattaagttgtctaagcgtcaatttgtttacaccacaatatatcctgcca

SEQ ID NO: 154 - DNA, 21414 bp, unidentified
  source 1..21414: mol_type = other DNA; note = Artificial
gtttacccgccaatatatcctgtcaaacactgcggccgcacttgaccgcggatggagccggagctgtggtgaggccatcgacgggaggtgggggagaacacagtctcagtgttctttgtgagtccgcaaggtttttagcttttctgtattaattaaggttgctgttggctgtagaatacggtcgtggaagagctgtatcggtagctactacgtaagctattatatactggaagtctggagctcgtcgatctccggtcgtcttcctccatttctcctcgtcttgctttgactgctgctaccatttgcttctgttttctgatgaagcatgccatgtcggccaccagtgtttgtgtggtttttgcagggaatggctttcaagtgctgtgattgaatggccctcgtcgtcctcggctgagctcacatggacgcgtcatgtgagtgagatatatgatcatatgatgagtggggttcgggtgagtgcgtacttgaagtaggatcccgctttcactcattcattcattggcctttaaaccgggaaattttcgcgaggagatggagggaagcaagcagggtgacgagtgcagagtgccgcgagcgctttgtcaaaaggcaccgccgtaggcaaaaaaatcaatggccctgactgactcgatggtagtactactgtagagactagagagggttgctccccatatcttcgtgtgacttttactccagcattgcatttccgtcattgagacgttaattaatagcagctttcgggacagatgactgtggccatgtttcgtcacggccgcttcgtgccagctgggggtactatagtactgtgattttgttagtaaaaactttcattaggccaccattgacgaccgggccttcgcttttgctgcgctaattaaccatttcccggcgaccgaagggaacatgaacatgccccgacacatgagggcatgaggactagtgttctccctgtcgttcgttgacttgactagtgatagtttaaacgctcttcaactggaagagcggttactaccggttcactagctagctgctaatcgagctagttaccctatgaggtgacatgaagcgctcacggttactatgacggttagcttcacgactgttggtggcagtagcgtacgacttagctatagttccggacttacctagctaataacttcgtatagcatacattatacgaagttatggttaccgccctggccgaagctttccggacttacccttaagcgatttaaatcctgaggcctgcaacactgatagtttaaactgaaggcgggaaacgacaatctgatcatgagcggagaattaagggagtcacgttatgacccccgccgatgacgcgggacaagccgttttacgtttggaactgacagaaccgcaacgattgaaggagccactcagccgcgggtttctggagtttaatgagctaagcacatacgtcagaaaccattattgcgcgttcaaaagtcgcctaaggtcactatcagctagcaaatatttcttgtcaaaaatgctccactgacgttccataaattcccctcggtatccaattagagtctcatattcactcccatggcggccaatgcgggcggcggtggagcgggaggaggcagcggcagcggcagcgtggctgcgccggcggtgtgccgccccagcggctcgcggtggacgccgacgccggagcagatcaggatgctgaaggagctctactacggctgcggcatccggtcgcccagctcggagcagatccagcgcatcaccgccatgctgcggcagcacggcaagatcgagggcaagaacgtcttctactggttccagaaccacaaggcccgcgagcgccagaagcgccgcctcaccagcctcgacgtcaacgtgcccgccgccggcgcggccgacgccaccaccagccaactcggcgtcctctcgctgtcgtcgccgccgccttcaggcgcggcgcctccctcgcccaccctcggcttctacgccgccggcaatggcggcggatcggctgtgctgctggacacgagttccgactggggcagcagcggcgctgctatggccaccgagacatgcttcctgcaggactacatgggcgtgacggacacgggcagctcgtcgcagtggccacgcttctcgtcgtcggacacgataatggcggcggccgcggcgcgggcggcgacgacgcgggcgcccgagacgctccctctcttcccgacctgcggcgacgacggcggcagcggtagcagcagctacttgccgttctggggtgccgcgtccacaactgccggcgccacttcttccgttgcgatccaacagcaacaccagctgcaggagcagtacagcttttacagcaacagcaacagcacccagctggccggcaccggcaaccaagacgtatcggcaacagcagcagcagccgccgccctggagctgagcctcagctcatggtgctccccttaccctgctgcagggagtatgtgagagcaacgcgagctgccactgctcttcactgatgtctctggaatggaaggaggaggaagtgagaacagatcattcgacaaagcagcattagtccgttgatcggtggaagaccactcgtcagtgttgagttgaatgtttgatcaataaaatacggcaatgctgtaagggttgttttttatgccattgataatacactgtactgttcagttgttgaactctatttcttagccatgccaagtgcttttcttattttgaataacattacagcaaaaagttgaaagacaaaaaaaaaaacccccgaacagagtgctttgggtcccaagcttctttagactgtgttcggcgttccccctaaatttctccccctatatctcactcacttgtcacatcagcgttctctttccccctatatctccacgctctacagcagttccacctatatcaaacctctataccccaccacaacaatattatatactttcatcttcaactaactcatgtaccttccaatttttttctactaataattatttacgtgcacagaaacttagcaaggagagagagagcgggaatttaaatgctcggcgttaggcttttagtccgctaggtggctagaccgaggttaggacgctagttcactaggggcctagtggtgttttaagacgtcacggtcaccgcggccgcatcgagcagctggcttgtggggaccagacaaaaaaggaatggtgcagaattgttaggcgcacctaccaaaagcatctttgcctttattgcaaagataaagcagattcctctagtacaagtggggaacaaaataacgtggaaaagagctgtcctgacagcccactcactaatgcgtatgacgaacgcagtgacgaccacaaaactcgagcaacgagatcatgagccaatcaaagaggagtgatgtagacctaaagcaataatggagccatgacgtaagggcttacgcccatacgaaataattaaaggctgatgtgacctgtcggtctctcagaacctttactttttatgtttggcgtgtatttttaaatttccacggcaatgacgatgtgaccgtcgacccactaaaacattgctttgtcaaaagctaaaaaagatgatgcccgacagccacttgtgtgaagcatgagaagccggtccctccactaagaaaattagtgaagcatcttccagtggtccctccactcacagctcaatcagtgagcaacaggacgaaggaaatgacgtaagccatgacgtctaatcccattcgaaacgcgtggaccgaagcttgcatgcctgcagtgcagcgtgacccggtcgtgcccctctctagagataatgagcattgcatgtctaagttataaaaaattaccacatattttttttgtcacacttgtttgaagtgcagtttatctatctttatacatatatttaaactttactctacgaataatataatctatagtactacaataatatcagtgttttagagaatcatataaatgaacagttagacatggtctaaaggacaattgagtattttgacaacaggactctacagttttatctttttagtgtgcatgtgttctcctttttttttgcaaatagcttcacctatataatacttcatccattttattagtacatccatttagggtttagggttaatggtttttatagactaatttttttagtacatctattttattctattttagcctctaaattaagaaaactaaaactctattttagtttttttatttaataatttagatataaaatagaataaaataaagtgactaaaaattaaacaaataccctttaagaaattaaaaaaactaaggaaacatttttcttgtttcgagtagataatgccagcctgttaaacgccgtcgacgagtctaacggacaccaaccagcgaaccagcagcgtcgcgtcgggccaagcgaagcagacggcacggcatctctgtcgctgcctctggacccctctcgagagttccgctccaccgttggacttgctccgctgtcggcatccagaaattgcgtggcggagcggcagacgtgagccggcacggcaggcggcctcctcctcctctcacggcaccggcagctacgggggattcctttcccaccgctccttcgctttcccttcctcgcccgccgtaataaatagacaccccctccacaccctctttccccaacctcgtgttgttcggagcgcacacacacacaaccagatctcccccaaatccacccgtcggcacctccgcttcaaggtacgccgctcgtcctcccccccccccctctctaccttctctagatcggcgttccggtccatgcatggttagggcccggtagttctacttctgttcatgtttgtgttagatccgtgtttgtgttagatccgtgctgctagcgttcgtacacggatgcgacctgtacgtcagacacgttctgattgctaacttgccagtgtttctctttggggaatcctgggatggctctagccgttccgcagacgggatcgatttcatgattttttttgtttcgttgcatagggtttggtttgcccttttcctttatttcaatatatgccgtgcacttgtttgtcgggtcatcttttcatgcttttttttgtcttggttgtgatgatgtggtctggttgggcggtcgttctagatcggagtagaattctgtttcaaactacctggtggatttattaattttggatctgtatgtgtgtgccatacatattcatagttacgaattgaagatgatggatggaaatatcgatctaggataggtatacatgttgatgcgggttttactgatgcatatacagagatgctttttgttcgcttggttgtgatgatgtggtgtggttgggcggtcgttcattcgttctagatcggagtagaatactgtttcaaactacctggtgtatttattaattttggaactgtatgtgtgtgtcatacatcttcatagttacgagtttaagatggatggaaatatcgatctaggataggtatacatgttgatgtgggttttactgatgcatatacatgatggcatatgcagcatctattcatatgctctaaccttgagtacctatctattataataaacaagtatgttttataattattttgatcttgatatacttggatgatggcatatgcagcagctatatgtggatttttttagccctgccttcatacgctatttatttgcttggtactgtttcttttgtcgatgctcaccctgttgtttggtgttacttctgcaggtcgactttaacttagcctaggatccatggccactgtgaacaactggctcgctttctccctctccccgcaggagctgccgccctcccagacgacggactccacactcatctcggccgccaccgccgaccatgtctccggcgatgtctgcttcaacatcccccaagattggagcatgaggggatcagagctttcggcgctcgtcgcggagccgaagctggaggacttcctcggcggcatctccttctccgagcagcatcacaaggccaactgcaacatgatacccagcactagcagcacagtttgctacgcgagctcaggtgctagcaccggctaccatcaccagctgtaccaccagcccaccagctcagcgctccacttcgcggactccgtaatggtggcttcctcggccggtgtccacgacggcggtgccatgctcagcgcggccgccgctaacggtgtcgctggcgctgccagtgccaacggcggcggcatcgggctgtccatgattaagaactggctgcggagccaaccggcgcccatgcagccgagggtggcggcggctgagggcgcgcaggggctctctttgtccatgaacatggcggggacgacccaaggcgctgctggcatgccacttctcgctggagagcgcgcacgggcgcccgagagtgtatcgacgtcagcacagggtggagccgtcgtcgtcacggcgccgaaggaggatagcggtggcagcggtgttgccggcgctctagtagccgtgagcacggacacgggtggcagcggcggcgcgtcggctgacaacacggcaaggaagacggtggacacgttcgggcagcgcacgtcgatttaccgtggcgtgacaaggcatagatggactgggagatatgaggcacatctttgggataacagttgcagaagggaagggcaaactcgtaagggtcgtcaagtctatttaggtggctatgataaagaggagaaagctgctagggcttatgatcttgctgctctgaagtactggggtgccacaacaacaacaaattttccagtgagtaactacgaaaaggagctcgaggacatgaagcacatgacaaggcaggagtttgtagcgtctctgagaaggaagagcagtggtttctccagaggtgcatccatttacaggggagtgactaggcatcaccaacatggaagatggcaagcacggattggacgagttgcagggaacaaggatctttacttgggcaccttcagcacccaggaggaggcagcggaggcgtacgacatcgcggcgatcaagttccgcggcctcaacgccgtcaccaacttcgacatgagccgctacgacgtgaagagcatcctggacagcagcgccctccccatcggcagcgccgccaagcgcctcaaggaggccgaggccgcagcgtccgcgcagcaccaccacgccggcgtggtgagctacgacgtcggccgcatcgcctcgcagctcggcgacggcggagccctggcggcggcgtacggcgcgcactaccacggcgccgcctggccgaccatcgcgttccagccgggcgccgccagcacaggcctgtaccacccgtacgcgcagcagccaatgcgcggcggcgggtggtgcaagcaggagcaggaccacgcggtgatcgcggccgcgcacagcctgcaggacctccaccacctgaacctgggcgcggccggcgcgcacgactttttctcggcagggcagcaggccgccgccgctgcgatgcacggcctgggtagcatcgacagtgcgtcgctcgagcacagcaccggctccaactccgtcgtctacaacggcggggtcggcgacagcaacggcgccagcgccgtcggcggcagtggcggtggctacatgatgccgatgagcgctgccggagcaaccactacatcggcaatggtgagccacgagcaggtgcatgcacgggcctacgacgaagccaagcaggctgctcagatggggtacgagagctacctggtgaacgcggagaacaatggtggcggaaggatgtctgcatgggggactgtcgtgtctgcagccgcggcggcagcagcaagcagcaacgacaacatggccgccgacgtcgggcatggcggcgcgcagctcttcagtgtctggaacgacacttaagcgtacctagtggtacctgacatcttatagtctgcaacctctcgtgtctgaattcctatctttatcaagtgttattgcttccacgactataggacagctttcgtcgaaagcttttgctcatgtgatctcgaaggattcatctagtctgatttttcgtgacttgtatcggttttattggattcatccaacatatatcaataaaaaatgagttgtgtttcctttcttcctagttcagttaaaattatttccctcctgcgcttgtgctgtaattgtctgtgtacctgttgtttgtgactgtgttagttcccttggatatgatttcgtatttgatatgtacatggagatagcttagcttcattattggagtatgaagttagtatgacatagtcactctcctggaaaattgacactgcaaaccatatttttattctgaaccacaaatcctagtcagtccgctggcatatgccgtccgtttgctgaatccagaacgtgggtttggagatgtacggctgagatgcctctatgcgaaggggatttcgtggtgaaacgagatgggagtagagcaacgcccgtggaagatgcttcaaacttccacacttttgagcaacgatcggcagtagtaaggtagacgatttcaagatcaaagcatatgaagataaacaacatcaacaacaaaatttgttggggttctatagagagaaacagagctacatacatacactgttttgtatctaccatctgagatgatgaaaagatgaaaaactaaagaatgccccggcgccaacgccaggacacgccgcgcgcgcgtcacccgagccatctcttgacccagccggcgctgtatatttacacacgttgcagcatcgatcaccacctgttcgatcgcgtcgccgtcaccggcgcgccgcgacttattgaactagtctagggcgcggctaacaacctagcttagattgccttgtctaaacccttaggctaacgcgccactctagaaggccgatctcccccgaacgcgccagatccgatatcgatgggccctggccgaagcttggtcacccggtccgggcctagaaggccgatctcccgggcacccagctttcttgtacaaagtggccgttaacggatcggccagaatggcccggaccgggttaccccgcggtagcttagagtcgcgtaataatagaaccaaactatgcaactatcattcctaccaaaaaaaaaaaaactatgcaactatcattagaaatatgtatctaataacgtgcatgttcgcattgcacgtcgtccttctttctccgacttttcctattttttttaatattattttatcaaatgtatctagcttagatacttttgatggagatgctccaatgataaaaaatagttgatccgttagccacgctagtaacatagtagttctgcataccattttctcttcattctcaattgcgtctgtttaaaatcaatgattgtgattttctaactttttcatattctattggatgggtctccaggtcaaggcgtcaagccagataatccagtggttagcagacttttcggaggagttcccgcaaatttttttcttttctttgaatttaatgtatatgcaaacttttttttagcataattataaatttttatatcctggatgttatctcggaattcgagctcggtaccctggttcacaaactcaatacaacacacagtggagtagggtattacgctccggcggcccgaaccactctaaatccttgtgtcctcgtgtgctcttccaccattaatgactgtaattgcagggacacgaagagttgtagcgcttttgccaacaagatccgctatatgctagtagagtggaacctgcacagcaacaagcatccaataatctgagaataagaattatgtgtggtgatggttctcatctctgcaactcgccattttcgcgagagaaccaaatccaagttggtgaagatcatgatttgggctcatgggctggcatagtagctattacctttgcaattgtggttcgaatctatccgatattctccttttcagggagagctaatgcttatgcttattgggtattttggtttgacactgcttcacgcccaaaaaaaggcaactatgtctgagttggatatggcccaaaaaaaggcagctatgtctgagttggatatggaagtcttctttcgtttagggtgaagtaagaccaagctcatgagcttattatcttaggtcggaacaaattagttgataggcatggcacatttatcaaattataatgattttaacagaaaagcaacacctctttttcagcagcaccagctttgcaagctgcaattgacactccaagcatagtatttgctccaaactcagcctgcatttcgcacaatatcatatctatttccatttggataaaatatattttccagaaatatgggaacagaatcaagatacagaaaaaagttgtggtagtagtggtaagtggaaacacaagtacagtgaaaagatagcattatttctgaacagtcaaattaaccgaaataagtagtatcacatactgcccctaaattgactacacccaatgtaaagaattgcttgagcatattgagccatcagttgtttgtttgtgtaacggatttgacaatgcagagttcaggagcaaaaaaccgcaaaggagagaaagagggaaaggatctcctagtatcccaccttgtggcgcgccctgtcaagtgcatgatggcctggtcgatctgcgtctgctgctgcggttccatcccaacgagtgcctccgacaccttgtcgttgatcacccgcaccgcgtaggcgacccccctggcgaggaacttccgcctctcggaggccccggccgcgtcggcggcggcgccctcgagcgcgcccacgctagccgtagatgctcggtgcacggccttgttggtgtgcaactcgacctcaacggccggtgcgctacgcccgtcaaggatctggcgcgcccgcaccctcgtgatcacggtgggcgcctcccgcctcatgtggccgacgatgaaaagcgccgggttaggggccttggcgcgcaccgccgtattcagggcctcctcgctcttgcgcgagagcaggtgcttccccaggtactcctgcactgacaaggctgccacagcggtggaatttgtcctcacgacttcgccacgtcgtcctcacctccctggcttcccacgactccgccgtatcgaggtgctcggtgggtcgtcttaatccgaagtccgaactaggaagacgagacagagaggtctgaggaatgggcctcgtttgatgttgagctgaattatttttccagcataagcccaggtcttggtccatgaacaaaattactagaaacccagcccagtactacgatctaaaagagggactgccactggatagctctctctagcattctccacgctccaatacagcggcgtcgtgtctatccgggtctatccgcgaacacgtgagaactctccagaaactgctttctcctccacttcatctctctcgctttccctctataaaaagaccccttctaggaattgagggagacagcaagcaccaagcagcgatccgaagctcaatcaattcactcaaacctcttccccaaatcttcgattagatcttcgttgacaagaagactagaaccgaacctgacatgtccaacctgctcacggttcaccagaaccttccggctcttccagtggacgcgacgtccgatgaagtcaggaagaacctcatggacatgttccgcgacaggcaagcgttcagcgagcacacctggaagatgctgctctccgtctgccgctcctgggctgcatggtgcaagctgaacaacaggaagtggttccccgctgagcccgaggacgtgagggattaccttctgtacctgcaagcgcgaggtttgtttctgcttctacctttgatatatatataataattatcattaattagtagtaatataatatttcaaatatttttttcaaaataaaagaatgtagtatatagcaattgcttttctgtagtttataagtgtgtatattttaatttataacttttctaatatatgaccaaaacatggtgatgcctaggtctggcagtgaagaccatccagcaacaccttggacaactgaacatgcttcacaggcgctccggcctcccgcgccccagcgactcgaacgccgtgagcctcgtcatgcgccgcatcaggaaggaaaacgtcgatgccggcgaaagggcaaagcaggccctcgcgttcgagaggaccgatttcgaccaggtccgcagcctgatggagaacagcgacaggtgccaggacattaggaacctggcgttcctcggaattgcatacaacacgctcctcaggatcgcggaaattgcccgcattcgcgtgaaggacattagccgcaccgacggcggcaggatgcttatccacattggcaggaccaagacgctcgtttccaccgcaggcgtcgaaaaggccctcagcctcggagtgaccaagctcgtcgaacgctggatctccgtgtccggcgtcgcggacgacccaaacaactacctcttctgccgcgtccgcaagaacggggtggctgcccctagcgccaccagccaactcagcacgagggccttggaaggtattttcgaggccacccaccgcctgatctacggcgcgaaggatgacagcggtcaacgctacctcgcatggtccgggcactccgcccgcgttggagctgctagggacatggcccgcgccggtgtttccatccccgaaatcatgcaggcgggtggatggacgaacgtgaacattgtcatgaactacattcgcaaccttgacagcgagacgggcgcaatggttcgcctcctggaagatggtgactgaggtacccaacctagacttgtccatcttctggattggccaacttaattaatgtatgaaataaaaggatgcacacatagtgacatgctaatcactataatgtgggcatcaaagttgtgtgttatgtgtaattactagttatctgaataaaagagaaagagatcatccatatttcttatcctaaatgaatgtcacgtgtctttataattctttgatgaaccagatgcatttcattaaccaaatccatatacatataaatattaatcatatataattaatatcaattgggttagcaaaacaaatctagtctaggtgtgttttgcgatccgataatcgatgggtctaaaaacggcccctaactaacgcttagttgcccgctagattagtcccccgttagtgcctagttagacacacgacgaactaggggctagcacgcgttagataacttcgtatagcatacattatacgaagttattccggaccgggttaccgaattcaattcctgcccttaaggccaattgttcaagattcattcaacaattgaaacatctcccatgattaaatcagtataaggttgctatggtcttgcttgacaaagtttttttttgagggaatttcaactaaatttttgagtgaaactatcaaatactgattttaaaaaatttttataaaaggaagcgcagagataaaaggccatctatgctacaaaagtacccaaaaatgtaatcctaaagtatgaattgcattttttttttgtttggacgaaaggaaaggagtattaccacaagaatgatatcatcttcatatttagatcttttttgggtaaagcttgagattctctaaatatagagaaatcagaagaaaaaaaaaccgtgttttggtggttttgatttctagcctccacaataactttgacggcgtcgacaagtctaacggacaccaagcagcgaaccaccagcgccgagccaagcgaagcagacggccgagacgttgacaccttcggcgcggcatctctcgagagttccgctccggcgctccacctccaccgctggcggtttcttattccgttccgttccgcctcctgctctgctcctctccacaccacacggcacgaaaccgttacggcaccggcagcacccagcacgggagaggggattcctttcccaccgttccttccctttccgccccgccgctataaatagccagccccatccccagcttttttccccaatctcatctcctctctcctgttgttcggagcacacgcacaatccgatcgatccccaaatccccttcgtctctcctcgcgagcctcgtggatcccagcttcaaggtacggcgatcgatcatcccccctccttctctctaccttcttttctctagactacatcggatggcgatccatggttagggcctgctagtttcccttcctgttttgtcgatggctgcgaggcacaatagatctgatggcgttatgacggctaacttgtcatgttgttgcgatttatagtccctttaggagatcagtttaatttctcggatggttcgagatcggtggtccatggttagtaccctaagatccgcgctgttagggttcgtagatggaggcgacctgttctgattgttaacttgtcagtacctgggaaatcctgggatggttctagctcgtccgcagatgagatcgatttcatgatcctctgtatcttgtttcgttgcctaggttccgtctaatctatccgtggtatgatgtagatgttttgatcgtgctaactacgtcttgtaaagttaattgtcaggtcataatttttagcatgcctttttttttgtttggttttgtctaattgggctgtcgttctagatcagagtagaagactgttccaaactacctgctggatttattgaacttggatctgtatgtgtgtcacatatcttcataaattcatgattaagatggattgaaatatcttttatctttttggtatggatagttctatatgttggtgtggctttgttagatgtatacatgcttagatacatgaagcaacgtgctgctactgtttagtaattgctgttcatttgtctaataaacagataaggatatgtatttatgttgctgttggttttgctggtactttgttggatacaaatgcttcaatacagaaaacagcatgctgctacgatttaccatttatctaatcttatcatatgtctaatctaataaacaaacatgcttttaaattatcttcatatgcttggatgatggcatacacagcggctatgtgtggttttttaaatacccagcatcatgggcatgcatgacactgctttaatatgctttttatttgcttgagactgtttcttttgtttatactgaccctttagttcggtgactcttctgcaggtcgactttaacttagcctaggatccatggcccagtccaagcacggcctgaccaaggagatgaccatgaagtaccgcatggagggctgcgtggacggccacaagttcgtgatcaccggcgagggcatcggctaccccttcaagggcaagcaggccatcaacctgtgcgtggtggagggcggccccttgcccttcgccgaggacatcttgtccgccgccttcatgtacggcaaccgcgtgttcaccgagtacccccaggacatcgtcgactacttcaagaactcctgccccgccggctacacctgggaccgctccttcctgttcgaggacggcgccgtgtgcatctgcaacgccgacatcaccgtgagcgtggaggagaactgcatgtaccacgagtccaagttctacggcgtgaacttccccgccgacggccccgtgatgaagaagatgaccgacaactgggagccctcctgcgagaagatcatccccgtgcccaagcagggcatcttgaagggcgacgtgagcatgtacctgctgctgaaggacggtggccgcttgcgctgccagttcgacaccgtgtacaaggccaagtccgtgccccgcaagatgcccgactggcacttcatccagcacaagctgacccgcgaggaccgcagcgacgccaagaaccagaagtggcacctgaccgagcacgccatcgcctccggctccgccttgccctccggactcagatctcgatagggtaccaatggccagttaacagatccagctgctgctgttctagggttcacaagtctgcctatttgtcttccccaatggagctatggttgtctggtctggtccttggtcgtgtcccgtttcattgtgtactatttacctgtaatgtgtatccttaagtctggtttgatggtgtctgaaacgttttgctgtggtagagcagcatggaagaactataatgaataagtgatccctaatcattgtgtccaaattttgcttctgctatacccttttgtgctgtttcttatgttttgcttaaaaatttgatctgacaaacaaatttgtctaaattatgctcttgttctgactgtgtactgtacacatttgtattgctaccggtttggcacatagttttctctttgattgcagatcaaacccttctgattgcagattgcttggctatggctgatgtgctcactgttcttctttagcttgtatattgctgatggtggcttggctacggctgaaaaagttgctgctgcgccgacttggcaactgttgctccagtaatgctttgtcctctcttcctagccgccgacttggcacttggcagctgttgctcctgtaatgcgttgttatctcttatctcttgagatgtactatgattttgaggctgtttgacttgtgccagattgccagtgctgatgctatattatctcaggtttttatgctagtatatgttttactgtgtgctgcctgtgtcgagttacgtaatctattgaaccgctatgcgtgttgatgccctgttgttgcttgccagattgatgcccctgttgcttgcagcttgcaagctgtagtgaaatcctaaaattcgaaaccaaatctattctgaacttttgaagatctgtgatgtccggaagaaaagattcaaacagataaacgggactctccagaatctataaaataaatgatcgacaaacgctttgctttggtaggcttcctagttagttagcggaccgaagcttcggtccgggcctagaaggccagcttcggccgcccctcggtaccctgggatctgcccttactttaacgcctctaaccaacacccctttatctttataaggaacaataaacagaatttgccccactgttctaaatcacctaataatatccccagctaaaaacaataaaggtttcctagaattaagacaagcatgactgttcctccaggagggtttggaacattgttgcagtcttgcagatacgggcgaagggtgagaaacagagcggagggctggaggtgacctcggtagtcgacgccggagttgagcttgacaacgacggggcggcccctgatggacttgaggaagtccgatggcgtcttcaccgtcccgccggcgcccgaggcgggcctgtcgctgccgccgccgccgctgctcatcttgcgcgctgtgcccccggcggtgtccctgtgttgcggatcgcgggtgggccaggtggatgcgagggcgacccgtttggactccggccggagccgccggatccctggtcggtgtcagtgccgtttactctgggccccacgtgtcagtaccgtctgtagatgacaacaacccgtcgtccacagtcatgtccaaaatatcctttcttcttttttttcgattcggatatctatcttccttttttttttccaaaaatcttcttgacgcaccagcgcgcacgtttgtggtaaacgccgacacgtcggtcccacgtcgatagaccccacccaccagtgagtagcgtgtacgtattcgggggtgacggacgtgtcgccgtcgtcttgctagtcccattcccatctgagccacacatctctgaacaaaaaaaaggagggaggcctccacgcacatccccctccgtgccacccgccccaaaccctcgcgccgcctccgagacagccgccgcaaccatggccaccgccgccgccgcgtctaccgcgctcactggcgccactaccgctgcgcccaaggcgaggcgccgggcgcacctcctggccacccgccgcgccctcgccgcgcccatcaggtgctcagcggcgtcacccgccatgccgatggctcccccggccaccccgctccggccgtggggccccaccgagccccgcaagggtgctgacatcctcgtcgagtccctcgagcgctgcggcgtccgcgacgtcttcgcctaccccggcggcgcgtccatggagatccaccaggcactcacccgctcccccgtcatcgccaaccacctcttccgccacgagcaaggggaggcctttgccgcctccggctacgcgcgctcctcgggccgcgtcggcgtctgcatcgccacctccggccccggcgccaccaacctagtctccgcgctcgccgacgcgctgctcgattccgtccccatggtcgccatcacgggacaggtggcgcgacgcatgattggcaccgacgccttccaggagacgcccatcgtcgaggtcacccgctccatcaccaagcacaactacctggtcctcgacgtcgacgacatcccccgcgtcgtgcaggaggctttcttcctcgcctcctctggtcgaccagggccggtgcttgtcgacatccccaaggacatccagcagcagatggcggtgcctgtctgggacaagcccatgagtctgcctgggtacattgcgcgccttcccaagccccctgcgactgagttgcttgagcaggtgctgcgtcttgttggtgaatcgcggcgccctgttctttatgtgggcggtggctgcgcagcatctggtgaggagttgcgacgctttgtggagctgactggaatcccggtcacaactactcttatgggcctcggcaacttccccagcgacgacccactgtctctgcgcatgctaggtatgcatgggacggtgtatgcaaattatgcagtggataaggccgatctgttgcttgcacttggtgtgcggtttgatgatcgcgtgacagggaagattgaggcttttgcaagcagggctaagattgtgcacgttgatattgatccggctgagattggcaagaacaagcagccacatgtgtccatctgtgcagatgttaagcttgctttgcagggcatgaatgctcttcttgaaggaagcacatcaaagaagagctttgactttggctcatggaacgatgagttggatcagcagaagagggaattcccccttgggtataaaacatctaatgaggagatccagccacaatatgctattcaggttcttgatgagctgacgaaaggcgaggccatcatcggcacaggtgttgggcagcaccagatgtgggcggcacagtactacacttacaagcggccaaggcagtggttgtcttcagctggtcttggggctatgggatttggtttgccggctgctgctggtgcttctgtggcaaacccaggtgtcactgttgttgacatcgatggagatggtagctttctcatgaacgttcaggagctagctatgatccgaattgagaacctcccagtgaaggtctttgtgctaaacaaccagcacctggggatggtggtgcagttggaggacaggttctataaggccaacagagcgcacacatacttgggaaacccagagaatgaaagtgagatatatccagatttcgtgacgatcgccaaagggttcaacattccagccgtccgtgtgacaaagaagaacgaagtccgcgcagcgataaagaagatgctcgagactccagggccgtacctcttggatataatcgtcccacaccaggagcatgtgttgcctatgatccctagtggtggggctttcaaggatatgatcctggatggtgatggcaggactgtgtactgacttcgaataggtacccggggatcctctagtgccgtgggtcgtttaagctgccgctgtacctgtgtcgtctggtgccttctggtgtacctgggaggttgtcgtctatcaagtatctgtggttggtgtcatgagtcagtgagtcccaatactgttcgtgtcctgtgtgcattatacccaaaactgttatgggcaaatcatgaataagcttgatgttcgaacttaaaagtctctgctcaatatggtattatggttgtttttgttcgtctcctaatatttgcctgggatcaaattttattggctggtgttcatttgacctccatgttcttgctaggctccattttttactctacagccataatatgtttgattgtttggtttgttctttgttgtacacctggttctgtcgagcttagttttcgacactggcttacagcttaacatgttgctattttattgggttctgattgctattttattgggttctgattgctagtttttgctgaatccaaaaaccatgttatttatttaagcgatccaggttattattatgatggtggctaagtttttttttttccaagggtaaattttctggattctccagtgtttctgtggccgaattcaatcactagagtcgacctgcaaagcttcggtccgggcctagaaggcccgcgccacttacgcttgattccgatgacttcgtaggttcctagctcaagccgctcgtgtccaagcgtcacttacgattagctaatgattacggcatctaggaccgactagttcttatgtgcttctagtctccaaatgtggttgatagttattttgctctaagatcaacagtaatgaagtataaatcatcgttgtggtgtgctactcggttaattgagcattaacacacacaaacatgacgaggatggtataatctccaaaaatgtgtactttgttaggtgggaccctatagccttgattaatgtgctatgttaggcatgcctggaaacgtgtgacgcatatgttttgtgaacctgttgatattatatgtgcttttatattaccatattttattaaaatactaatatttattactagtaagatataacattctatctagcttaaaaactaaccataaatattccataataactagatttaccaaactaatatactaaatatacataataaatacaaaattaacaagacaataatcaatatttatgagcttaatatatttagacattatggttggtcgacgataatcatgctaacttttcgtaattgcttgattgaaatatgcttagaataatgcctctttgttctacatggcaaatagggaccattatggtgtaacaccctgggaaccacaaacaccccgaaatgctactaaactacacaactaaccttcatatataaaatttcgacagcatctcctttgaaaatttgcatagacgtggaagcaacagagtataaacagatctgcgtttaaacgtgcaagcgctactagacaattcagtacattaaaaacgtccgcaatgtgttattaagttgtctaagcgtcaatttgtttacaccacaatatatcctgcca

SEQ ID NO: 155 - DNA, 21414 bp, unidentified
  source 1..21414: mol_type = other DNA; note = Artificial
gtttacccgccaatatatcctgtcaaacactgcggccgcacttgaccgcggatggagccggagctgtggtgaggccatcgacgggaggtgggggagaacacagtctcagtgttctttgtgagtccgcaaggtttttagcttttctgtattaattaaggttgctgttggctgtagaatacggtcgtggaagagctgtatcggtagctactacgtaagctattatatactggaagtctggagctcgtcgatctccggtcgtcttcctccatttctcctcgtcttgctttgactgctgctaccatttgcttctgttttctgatgaagcatgccatgtcggccaccagtgtttgtgtggtttttgcagggaatggctttcaagtgctgtgattgaatggccctcgtcgtcctcggctgagctcacatggacgcgtcatgtgagtgagatatatgatcatatgatgagtggggttcgggtgagtgcgtacttgaagtaggatcccgctttcactcattcattcattggcctttaaaccgggaaattttcgcgaggagatggagggaagcaagcagggtgacgagtgcagagtgccgcgagcgctttgtcaaaaggcaccgccgtaggcaaaaaaatcaatggccctgactgactcgatggtagtactactgtagagactagagagggttgctccccatatcttcgtgtgacttttactccagcattgcatttccgtcattgagacgttaattaatagcagctttcgggacagatgactgtggccatgtttcgtcacggccgcttcgtgccagctgggggtactatagtactgtgattttgttagtaaaaactttcattaggccaccattgacgaccgggccttcgcttttgctgcgctaattaaccatttcccggcgaccgaagggaacatgaacatgccccgacacatgagggcatgaggactagtgttctccctgtcgttcgttgacttgactagtgatagtttaaacgctcttcaactggaagagcggttactaccggttcactagctagctgctaatcgagctagttaccctatgaggtgacatgaagcgctcacggttactatgacggttagcttcacgactgttggtggcagtagcgtacgacttagctatagttccggacttacctagctaataacttcgtatagcatacattatacgaagttatggttaccgccctggccgaagctttccggacttacccttaagcgatttaaatcctgaggcctgcaacactgatagtttaaactgaaggcgggaaacgacaatctgatcatgagcggagaattaagggagtcacgttatgacccccgccgatgacgcgggacaagccgttttacgtttggaactgacagaaccgcaacgattgaaggagccactcagccgcgggtttctggagtttaatgagctaagcacatacgtcagaaaccattattgcgcgttcaaaagtcgcctaaggtcactatcagctagcaaatatttcttgtcaaaaatgctccactgacgttccataaattcccctcggtatccaattagagtctcatattcactcccatggcggccaatgcgggcggcggtggagcgggaggaggcagcggcagcggcagcgtggctgcgccggcggtgtgccgccccagcggctcgcggtggacgccgacgccggagcagatcaggatgctgaaggagctctactacggctgcggcatccggtcgcccagctcggagcagatccagcgcatcaccgccatgctgcggcagcacggcaagatcgagggcaagaacgtcttctactggttccagaaccacaaggcccgcgagcgccagaagcgccgcctcaccagcctcgacgtcaacgtgcccgccgccggcgcggccgacgccaccaccagccaactcggcgtcctctcgctgtcgtcgccgccgccttcaggcgcggcgcctccctcgcccaccctcggcttctacgccgccggcaatggcggcggatcggctgtgctgctggacacgagttccgactggggcagcagcggcgctgctatggccaccgagacatgcttcctgcaggactacatgggcgtgacggacacgggcagctcgtcgcagtggccacgcttctcgtcgtcggacacgataatggcggcggccgcggcgcgggcggcgacgacgcgggcgcccgagacgctccctctcttcccgacctgcggcgacgacggcggcagcggtagcagcagctacttgccgttctggggtgccgcgtccacaactgccggcgccacttcttccgttgcgatccaacagcaacaccagctgcaggagcagtacagcttttacagcaacagcaacagcacccagctggccggcaccggcaaccaagacgtatcggcaacagcagcagcagccgccgccctggagctgagcctcagctcatggtgctccccttaccctgctgcagggagtatgtgagagcaacgcgagctgccactgctcttcactgatgtctctggaatggaaggaggaggaagtgagaacagatcattcgacaaagcagcattagtccgttgatcggtggaagaccactcgtcagtgttgagttgaatgtttgatcaataaaatacggcaatgctgtaagggttgttttttatgccattgataatacactgtactgttcagttgttgaactctatttcttagccatgccaagtgcttttcttattttgaataacattacagcaaaaagttgaaagacaaaaaaaaaaacccccgaacagagtgctttgggtcccaagcttctttagactgtgttcggcgttccccctaaatttctccccctatatctcactcacttgtcacatcagcgttctctttccccctatatctccacgctctacagcagttccacctatatcaaacctctataccccaccacaacaatattatatactttcatcttcaactaactcatgtaccttccaatttttttctactaataattatttacgtgcacagaaacttagcaaggagagagagagcgggaatttaaatgctcggcgttaggcttttagtccgctaggtggctagaccgaggttaggacgctagttcactaggggcctagtggtgttttaagacgtcacggtcaccgcggccgcatcgagcagctggcttgtggggaccagacaaaaaaggaatggtgcagaattgttaggcgcacctaccaaaagcatctttgcctttattgcaaagataaagcagattcctctagtacaagtggggaacaaaataacgtggaaaagagctgtcctgacagcccactcactaatgcgtatgacgaacgcagtgacgaccacaaaactcgagcaacgagatcatgagccaatcaaagaggagtgatgtagacctaaagcaataatggagccatgacgtaagggcttacgcccatacgaaataattaaaggctgatgtgacctgtcggtctctcagaacctttactttttatgtttggcgtgtatttttaaatttccacggcaatgacgatgtgaccgtcgacccactaaaacattgctttgtcaaaagctaaaaaagatgatgcccgacagccacttgtgtgaagcatgagaagccggtccctccactaagaaaattagtgaagcatcttccagtggtccctccactcacagctcaatcagtgagcaacaggacgaaggaaatgacgtaagccatgacgtctaatcccattcgaaacgcgtggaccgaagcttgcatgcctgcagtgcagcgtgacccggtcgtgcccctctctagagataatgagcattgcatgtctaagttataaaaaattaccacatattttttttgtcacacttgtttgaagtgcagtttatctatctttatacatatatttaaactttactctacgaataatataatctatagtactacaataatatcagtgttttagagaatcatataaatgaacagttagacatggtctaaaggacaattgagtattttgacaacaggactctacagttttatctttttagtgtgcatgtgttctcctttttttttgcaaatagcttcacctatataatacttcatccattttattagtacatccatttagggtttagggttaatggtttttatagactaatttttttagtacatctattttattctattttagcctctaaattaagaaaactaaaactctattttagtttttttatttaataatttagatataaaatagaataaaataaagtgactaaaaattaaacaaataccctttaagaaattaaaaaaactaaggaaacatttttcttgtttcgagtagataatgccagcctgttaaacgccgtcgacgagtctaacggacaccaaccagcgaaccagcagcgtcgcgtcgggccaagcgaagcagacggcacggcatctctgtcgctgcctctggacccctctcgagagttccgctccaccgttggacttgctccgctgtcggcatccagaaattgcgtggcggagcggcagacgtgagccggcacggcaggcggcctcctcctcctctcacggcaccggcagctacgggggattcctttcccaccgctccttcgctttcccttcctcgcccgccgtaataaatagacaccccctccacaccctctttccccaacctcgtgttgttcggagcgcacacacacacaaccagatctcccccaaatccacccgtcggcacctccgcttcaaggtacgccgctcgtcctcccccccccccctctctaccttctctagatcggcgttccggtccatgcatggttagggcccggtagttctacttctgttcatgtttgtgttagatccgtgtttgtgttagatccgtgctgctagcgttcgtacacggatgcgacctgtacgtcagacacgttctgattgctaacttgccagtgtttctctttggggaatcctgggatggctctagccgttccgcagacgggatcgatttcatgattttttttgtttcgttgcatagggtttggtttgcccttttcctttatttcaatatatgccgtgcacttgtttgtcgggtcatcttttcatgcttttttttgtcttggttgtgatgatgtggtctggttgggcggtcgttctagatcggagtagaattctgtttcaaactacctggtggatttattaattttggatctgtatgtgtgtgccatacatattcatagttacgaattgaagatgatggatggaaatatcgatctaggataggtatacatgttgatgcgggttttactgatgcatatacagagatgctttttgttcgcttggttgtgatgatgtggtgtggttgggcggtcgttcattcgttctagatcggagtagaatactgtttcaaactacctggtgtatttattaattttggaactgtatgtgtgtgtcatacatcttcatagttacgagtttaagatggatggaaatatcgatctaggataggtatacatgttgatgtgggttttactgatgcatatacatgatggcatatgcagcatctattcatatgctctaaccttgagtacctatctattataataaacaagtatgttttataattattttgatcttgatatacttggatgatggcatatgcagcagctatatgtggatttttttagccctgccttcatacgctatttatttgcttggtactgtttcttttgtcgatgctcaccctgttgtttggtgttacttctgcaggtcgactttaacttagcctaggatccatggccactgtgaacaactggctcgctttctccctctccccgcaggagctgccgccctcccagacgacggactccacactcatctcggccgccaccgccgaccatgtctccggcgatgtctgcttcaacatcccccaagattggagcatgaggggatcagagctttcggcgctcgtcgcggagccgaagctggaggacttcctcggcggcatctccttctccgagcagcatcacaaggccaactgcaacatgatacccagcactagcagcacagtttgctacgcgagctcaggtgctagcaccggctaccatcaccagctgtaccaccagcccaccagctcagcgctccacttcgcggactccgtaatggtggcttcctcggccggtgtccacgacggcggtgccatgctcagcgcggccgccgctaacggtgtcgctggcgctgccagtgccaacggcggcggcatcgggctgtccatgattaagaactggctgcggagccaaccggcgcccatgcagccgagggtggcggcggctgagggcgcgcaggggctctctttgtccatgaacatggcggggacgacccaaggcgctgctggcatgccacttctcgctggagagcgcgcacgggcgcccgagagtgtatcgacgtcagcacagggtggagccgtcgtcgtcacggcgccgaaggaggatagcggtggcagcggtgttgccggcgctctagtagccgtgagcacggacacgggtggcagcggcggcgcgtcggctgacaacacggcaaggaagacggtggacacgttcgggcagcgcacgtcgatttaccgtggcgtgacaaggcatagatggactgggagatatgaggcacatctttgggataacagttgcagaagggaagggcaaactcgtaagggtcgtcaagtctatttaggtggctatgataaagaggagaaagctgctagggcttatgatcttgctgctctgaagtactggggtgccacaacaacaacaaattttccagtgagtaactacgaaaaggagctcgaggacatgaagcacatgacaaggcaggagtttgtagcgtctctgagaaggaagagcagtggtttctccagaggtgcatccatttacaggggagtgactaggcatcaccaacatggaagatggcaagcacggattggacgagttgcagggaacaaggatctttacttgggcaccttcagcacccaggaggaggcagcggaggcgtacgacatcgcggcgatcaagttccgcggcctcaacgccgtcaccaacttcgacatgagccgctacgacgtgaagagcatcctggacagcagcgccctccccatcggcagcgccgccaagcgcctcaaggaggccgaggccgcagcgtccgcgcagcaccaccacgccggcgtggtgagctacgacgtcggccgcatcgcctcgcagctcggcgacggcggagccctggcggcggcgtacggcgcgcactaccacggcgccgcctggccgaccatcgcgttccagccgggcgccgccagcacaggcctgtaccacccgtacgcgcagcagccaatgcgcggcggcgggtggtgcaagcaggagcaggaccacgcggtgatcgcggccgcgcacagcctgcaggacctccaccacctgaacctgggcgcggccggcgcgcacgactttttctcggcagggcagcaggccgccgccgctgcgatgcacggcctgggtagcatcgacagtgcgtcgctcgagcacagcaccggctccaactccgtcgtctacaacggcggggtcggcgacagcaacggcgccagcgccgtcggcggcagtggcggtggctacatgatgccgatgagcgctgccggagcaaccactacatcggcaatggtgagccacgagcaggtgcatgcacgggcctacgacgaagccaagcaggctgctcagatggggtacgagagctacctggtgaacgcggagaacaatggtggcggaaggatgtctgcatgggggactgtcgtgtctgcagccgcggcggcagcagcaagcagcaacgacaacatggccgccgacgtcgggcatggcggcgcgcagctcttcagtgtctggaacgacacttaagcgtacctagtggtacctgacatcttatagtctgcaacctctcgtgtctgaattcctatctttatcaagtgttattgcttccacgactataggacagctttcgtcgaaagcttttgctcatgtgatctcgaaggattcatctagtctgatttttcgtgacttgtatcggttttattggattcatccaacatatatcaataaaaaatgagttgtgtttcctttcttcctagttcagttaaaattatttccctcctgcgcttgtgctgtaattgtctgtgtacctgttgtttgtgactgtgttagttcccttggatatgatttcgtatttgatatgtacatggagatagcttagcttcattattggagtatgaagttagtatgacatagtcactctcctggaaaattgacactgcaaaccatatttttattctgaaccacaaatcctagtcagtccgctggcatatgccgtccgtttgctgaatccagaacgtgggtttggagatgtacggctgagatgcctctatgcgaaggggatttcgtggtgaaacgagatgggagtagagcaacgcccgtggaagatgcttcaaacttccacacttttgagcaacgatcggcagtagtaaggtagacgatttcaagatcaaagcatatgaagataaacaacatcaacaacaaaatttgttggggttctatagagagaaacagagctacatacatacactgttttgtatctaccatctgagatgatgaaaagatgaaaaactaaagaatgccccggcgccaacgccaggacacgccgcgcgcgcgtcacccgagccatctcttgacccagccggcgctgtatatttacacacgttgcagcatcgatcaccacctgttcgatcgcgtcgccgtcaccggcgcgccgcgacttattgaactagtctagggcgcggctaacaacctagcttagattgccttgtctaaacccttaggctaacgcgccactctagaaggccgatctcccccgaacgcgccagatccgatatcgatgggccctggccgaagcttggtcacccggtccgggcctagaaggccgatctcccgggcacccagctttcttgtacaaagtggccgttaacggatcggccagaatggcccggaccgggttaccccgcggtcatgttgttgactaaaaatgataccaaaggctcacaggcacatgttaataccattataccacaatttactatctagatattaaagacataaatggtaaataagttatagataaattttcctatatggaacggaaatgccttctgtttaattttctggatggtgaaaaacaatggagcaattcttcttatttaccaagattatgcgagtgggaaaaagttctaacctcatagatgatatcgaagaagtgtgtcggtctaatctgtaggtcgagacgtggaggctatccccagttaaaggaatctgtaccaaactgaaacatcttctactcagtcaaatcccaatcctcatctcctacttatttcacaaacgcaaaaaaaaacagcccattgtatagatcgtgagttcttactattgaaggttacgaattgatggaatcggcttcttgttgcgattgaacggtagccatcttggtacgacatcatcgtaagaagccttgatgaattcgagctcggtaccctggttcacaaactcaatacaacacacagtggagtagggtattacgctccggcggcccgaaccactctaaatccttgtgtcctcgtgtgctcttccaccattaatgactgtaattgcagggacacgaagagttgtagcgcttttgccaacaagatccgctatatgctagtagagtggaacctgcacagcaacaagcatccaataatctgagaataagaattatgtgtggtgatggttctcatctctgcaactcgccattttcgcgagagaaccaaatccaagttggtgaagatcatgatttgggctcatgggctggcatagtagctattacctttgcaattgtggttcgaatctatccgatattctccttttcagggagagctaatgcttatgcttattgggtattttggtttgacactgcttcacgcccaaaaaaaggcaactatgtctgagttggatatggcccaaaaaaaggcagctatgtctgagttggatatggaagtcttctttcgtttagggtgaagtaagaccaagctcatgagcttattatcttaggtcggaacaaattagttgataggcatggcacatttatcaaattataatgattttaacagaaaagcaacacctctttttcagcagcaccagctttgcaagctgcaattgacactccaagcatagtatttgctccaaactcagcctgcatttcgcacaatatcatatctatttccatttggataaaatatattttccagaaatatgggaacagaatcaagatacagaaaaaagttgtggtagtagtggtaagtggaaacacaagtacagtgaaaagatagcattatttctgaacagtcaaattaaccgaaataagtagtatcacatactgcccctaaattgactacacccaatgtaaagaattgcttgagcatattgagccatcagttgtttgtttgtgtaacggatttgacaatgcagagttcaggagcaaaaaaccgcaaaggagagaaagagggaaaggatctcctagtatcccaccttgtggcgcgccctgtcaagtgcatgatggcctggtcgatctgcgtctgctgctgcggttccatcccaacgagtgcctccgacaccttgtcgttgatcacccgcaccgcgtaggcgacccccctggcgaggaacttccgcctctcggaggccccggccgcgtcggcggcggcgccctcgagcgcgcccacgctagccgtagatgctcggtgcacggccttgttggtgtgcaactcgacctcaacggccggtgcgctacgcccgtcaaggatctggcgcgcccgcaccctcgtgatcacggtgggcgcctcccgcctcatgtggccgacgatgaaaagcgccgggttaggggccttggcgcgcaccgccgtattcagggcctcctcgctcttgcgcgagagcaggtgcttccccaggtactcctgcactgacaaggctgccacagcggtggaatttgtcctcacgacttcgccacgtcgtcctcacctccctggcttcccacgactccgccgtatcgaggtgctcggtgggtcgtcttaatccgaagtccgaactaggaagacgagacagagaggtctgaggaatgggcctcgtttgatgttgagctgaattatttttccagcataagcccaggtcttggtccatgaacaaaattactagaaacccagcccagtactacgatctaaaagagggactgccactggatagctctctctagcattctccacgctccaatacagcggcgtcgtgtctatccgggtctatccgcgaacacgtgagaactctccagaaactgctttctcctccacttcatctctctcgctttccctctataaaaagaccccttctaggaattgagggagacagcaagcaccaagcagcgatccgaagctcaatcaattcactcaaacctcttccccaaatcttcgattagatcttcgttgacaagaagactagaaccgaacctgacatgtccaacctgctcacggttcaccagaaccttccggctcttccagtggacgcgacgtccgatgaagtcaggaagaacctcatggacatgttccgcgacaggcaagcgttcagcgagcacacctggaagatgctgctctccgtctgccgctcctgggctgcatggtgcaagctgaacaacaggaagtggttccccgctgagcccgaggacgtgagggattaccttctgtacctgcaagcgcgaggtttgtttctgcttctacctttgatatatatataataattatcattaattagtagtaatataatatttcaaatatttttttcaaaataaaagaatgtagtatatagcaattgcttttctgtagtttataagtgtgtatattttaatttataacttttctaatatatgaccaaaacatggtgatgcctaggtctggcagtgaagaccatccagcaacaccttggacaactgaacatgcttcacaggcgctccggcctcccgcgccccagcgactcgaacgccgtgagcctcgtcatgcgccgcatcaggaaggaaaacgtcgatgccggcgaaagggcaaagcaggccctcgcgttcgagaggaccgatttcgaccaggtccgcagcctgatggagaacagcgacaggtgccaggacattaggaacctggcgttcctcggaattgcatacaacacgctcctcaggatcgcggaaattgcccgcattcgcgtgaaggacattagccgcaccgacggcggcaggatgcttatccacattggcaggaccaagacgctcgtttccaccgcaggcgtcgaaaaggccctcagcctcggagtgaccaagctcgtcgaacgctggatctccgtgtccggcgtcgcggacgacccaaacaactacctcttctgccgcgtccgcaagaacggggtggctgcccctagcgccaccagccaactcagcacgagggccttggaaggtattttcgaggccacccaccgcctgatctacggcgcgaaggatgacagcggtcaacgctacctcgcatggtccgggcactccgcccgcgttggagctgctagggacatggcccgcgccggtgtttccatccccgaaatcatgcaggcgggtggatggacgaacgtgaacattgtcatgaactacattcgcaaccttgacagcgagacgggcgcaatggttcgcctcctggaagatggtgactgaggtacccaacctagacttgtccatcttctggattggccaacttaattaatgtatgaaataaaaggatgcacacatagtgacatgctaatcactataatgtgggcatcaaagttgtgtgttatgtgtaattactagttatctgaataaaagagaaagagatcatccatatttcttatcctaaatgaatgtcacgtgtctttataattctttgatgaaccagatgcatttcattaaccaaatccatatacatataaatattaatcatatataattaatatcaattgggttagcaaaacaaatctagtctaggtgtgttttgcgatccgataatcgatgggtctaaaaacggcccctaactaacgcttagttgcccgctagattagtcccccgttagtgcctagttagacacacgacgaactaggggctagcacgcgttagataacttcgtatagcatacattatacgaagttattccggaccgggttaccgaattcaattcctgcccttaaggccaattgttcaagattcattcaacaattgaaacatctcccatgattaaatcagtataaggttgctatggtcttgcttgacaaagtttttttttgagggaatttcaactaaatttttgagtgaaactatcaaatactgattttaaaaaatttttataaaaggaagcgcagagataaaaggccatctatgctacaaaagtacccaaaaatgtaatcctaaagtatgaattgcattttttttttgtttggacgaaaggaaaggagtattaccacaagaatgatatcatcttcatatttagatcttttttgggtaaagcttgagattctctaaatatagagaaatcagaagaaaaaaaaaccgtgttttggtggttttgatttctagcctccacaataactttgacggcgtcgacaagtctaacggacaccaagcagcgaaccaccagcgccgagccaagcgaagcagacggccgagacgttgacaccttcggcgcggcatctctcgagagttccgctccggcgctccacctccaccgctggcggtttcttattccgttccgttccgcctcctgctctgctcctctccacaccacacggcacgaaaccgttacggcaccggcagcacccagcacgggagaggggattcctttcccaccgttccttccctttccgccccgccgctataaatagccagccccatccccagcttttttccccaatctcatctcctctctcctgttgttcggagcacacgcacaatccgatcgatccccaaatccccttcgtctctcctcgcgagcctcgtggatcccagcttcaaggtacggcgatcgatcatcccccctccttctctctaccttcttttctctagactacatcggatggcgatccatggttagggcctgctagtttcccttcctgttttgtcgatggctgcgaggcacaatagatctgatggcgttatgacggctaacttgtcatgttgttgcgatttatagtccctttaggagatcagtttaatttctcggatggttcgagatcggtggtccatggttagtaccctaagatccgcgctgttagggttcgtagatggaggcgacctgttctgattgttaacttgtcagtacctgggaaatcctgggatggttctagctcgtccgcagatgagatcgatttcatgatcctctgtatcttgtttcgttgcctaggttccgtctaatctatccgtggtatgatgtagatgttttgatcgtgctaactacgtcttgtaaagttaattgtcaggtcataatttttagcatgcctttttttttgtttggttttgtctaattgggctgtcgttctagatcagagtagaagactgttccaaactacctgctggatttattgaacttggatctgtatgtgtgtcacatatcttcataaattcatgattaagatggattgaaatatcttttatctttttggtatggatagttctatatgttggtgtggctttgttagatgtatacatgcttagatacatgaagcaacgtgctgctactgtttagtaattgctgttcatttgtctaataaacagataaggatatgtatttatgttgctgttggttttgctggtactttgttggatacaaatgcttcaatacagaaaacagcatgctgctacgatttaccatttatctaatcttatcatatgtctaatctaataaacaaacatgcttttaaattatcttcatatgcttggatgatggcatacacagcggctatgtgtggttttttaaatacccagcatcatgggcatgcatgacactgctttaatatgctttttatttgcttgagactgtttcttttgtttatactgaccctttagttcggtgactcttctgcaggtcgactttaacttagcctaggatccatggcccagtccaagcacggcctgaccaaggagatgaccatgaagtaccgcatggagggctgcgtggacggccacaagttcgtgatcaccggcgagggcatcggctaccccttcaagggcaagcaggccatcaacctgtgcgtggtggagggcggccccttgcccttcgccgaggacatcttgtccgccgccttcatgtacggcaaccgcgtgttcaccgagtacccccaggacatcgtcgactacttcaagaactcctgccccgccggctacacctgggaccgctccttcctgttcgaggacggcgccgtgtgcatctgcaacgccgacatcaccgtgagcgtggaggagaactgcatgtaccacgagtccaagttctacggcgtgaacttccccgccgacggccccgtgatgaagaagatgaccgacaactgggagccctcctgcgagaagatcatccccgtgcccaagcagggcatcttgaagggcgacgtgagcatgtacctgctgctgaaggacggtggccgcttgcgctgccagttcgacaccgtgtacaaggccaagtccgtgccccgcaagatgcccgactggcacttcatccagcacaagctgacccgcgaggaccgcagcgacgccaagaaccagaagtggcacctgaccgagcacgccatcgcctccggctccgccttgccctccggactcagatctcgatagggtaccaatggccagttaacagatccagctgctgctgttctagggttcacaagtctgcctatttgtcttccccaatggagctatggttgtctggtctggtccttggtcgtgtcccgtttcattgtgtactatttacctgtaatgtgtatccttaagtctggtttgatggtgtctgaaacgttttgctgtggtagagcagcatggaagaactataatgaataagtgatccctaatcattgtgtccaaattttgcttctgctatacccttttgtgctgtttcttatgttttgcttaaaaatttgatctgacaaacaaatttgtctaaattatgctcttgttctgactgtgtactgtacacatttgtattgctaccggtttggcacatagttttctctttgattgcagatcaaacccttctgattgcagattgcttggctatggctgatgtgctcactgttcttctttagcttgtatattgctgatggtggcttggctacggctgaaaaagttgctgctgcgccgacttggcaactgttgctccagtaatgctttgtcctctcttcctagccgccgacttggcacttggcagctgttgctcctgtaatgcgttgttatctcttatctcttgagatgtactatgattttgaggctgtttgacttgtgccagattgccagtgctgatgctatattatctcaggtttttatgctagtatatgttttactgtgtgctgcctgtgtcgagttacgtaatctattgaaccgctatgcgtgttgatgccctgttgttgcttgccagattgatgcccctgttgcttgcagcttgcaagctgtagtgaaatcctaaaattcgaaaccaaatctattctgaacttttgaagatctgtgatgtccggaagaaaagattcaaacagataaacgggactctccagaatctataaaataaatgatcgacaaacgctttgctttggtaggcttcctagttagttagcggaccgaagcttcggtccgggcctagaaggccagcttcggccgcccctcggtaccctgggatctgcccttactttaacgcctctaaccaacacccctttatctttataaggaacaataaacagaatttgccccactgttctaaatcacctaataatatccccagctaaaaacaataaaggtttcctagaattaagacaagcatgactgttcctccaggagggtttggaacattgttgcagtcttgcagatacgggcgaagggtgagaaacagagcggagggctggaggtgacctcggtagtcgacgccggagttgagcttgacaacgacggggcggcccctgatggacttgaggaagtccgatggcgtcttcaccgtcccgccggcgcccgaggcgggcctgtcgctgccgccgccgccgctgctcatcttgcgcgctgtgcccccggcggtgtccctgtgttgcggatcgcgggtgggccaggtggatgcgagggcgacccgtttggactccggccggagccgccggatccctggtcggtgtcagtgccgtttactctgggccccacgtgtcagtaccgtctgtagatgacaacaacccgtcgtccacagtcatgtccaaaatatcctttcttcttttttttcgattcggatatctatcttccttttttttttccaaaaatcttcttgacgcaccagcgcgcacgtttgtggtaaacgccgacacgtcggtcccacgtcgatagaccccacccaccagtgagtagcgtgtacgtattcgggggtgacggacgtgtcgccgtcgtcttgctagtcccattcccatctgagccacacatctctgaacaaaaaaaaggagggaggcctccacgcacatccccctccgtgccacccgccccaaaccctcgcgccgcctccgagacagccgccgcaaccatggccaccgccgccgccgcgtctaccgcgctcactggcgccactaccgctgcgcccaaggcgaggcgccgggcgcacctcctggccacccgccgcgccctcgccgcgcccatcaggtgctcagcggcgtcacccgccatgccgatggctcccccggccaccccgctccggccgtggggccccaccgagccccgcaagggtgctgacatcctcgtcgagtccctcgagcgctgcggcgtccgcgacgtcttcgcctaccccggcggcgcgtccatggagatccaccaggcactcacccgctcccccgtcatcgccaaccacctcttccgccacgagcaaggggaggcctttgccgcctccggctacgcgcgctcctcgggccgcgtcggcgtctgcatcgccacctccggccccggcgccaccaacctagtctccgcgctcgccgacgcgctgctcgattccgtccccatggtcgccatcacgggacaggtggcgcgacgcatgattggcaccgacgccttccaggagacgcccatcgtcgaggtcacccgctccatcaccaagcacaactacctggtcctcgacgtcgacgacatcccccgcgtcgtgcaggaggctttcttcctcgcctcctctggtcgaccagggccggtgcttgtcgacatccccaaggacatccagcagcagatggcggtgcctgtctgggacaagcccatgagtctgcctgggtacattgcgcgccttcccaagccccctgcgactgagttgcttgagcaggtgctgcgtcttgttggtgaatcgcggcgccctgttctttatgtgggcggtggctgcgcagcatctggtgaggagttgcgacgctttgtggagctgactggaatcccggtcacaactactcttatgggcctcggcaacttccccagcgacgacccactgtctctgcgcatgctaggtatgcatgggacggtgtatgcaaattatgcagtggataaggccgatctgttgcttgcacttggtgtgcggtttgatgatcgcgtgacagggaagattgaggcttttgcaagcagggctaagattgtgcacgttgatattgatccggctgagattggcaagaacaagcagccacatgtgtccatctgtgcagatgttaagcttgctttgcagggcatgaatgctcttcttgaaggaagcacatcaaagaagagctttgactttggctcatggaacgatgagttggatcagcagaagagggaattcccccttgggtataaaacatctaatgaggagatccagccacaatatgctattcaggttcttgatgagctgacgaaaggcgaggccatcatcggcacaggtgttgggcagcaccagatgtgggcggcacagtactacacttacaagcggccaaggcagtggttgtcttcagctggtcttggggctatgggatttggtttgccggctgctgctggtgcttctgtggcaaacccaggtgtcactgttgttgacatcgatggagatggtagctttctcatgaacgttcaggagctagctatgatccgaattgagaacctcccagtgaaggtctttgtgctaaacaaccagcacctggggatggtggtgcagttggaggacaggttctataaggccaacagagcgcacacatacttgggaaacccagagaatgaaagtgagatatatccagatttcgtgacgatcgccaaagggttcaacattccagccgtccgtgtgacaaagaagaacgaagtccgcgcagcgataaagaagatgctcgagactccagggccgtacctcttggatataatcgtcccacaccaggagcatgtgttgcctatgatccctagtggtggggctttcaaggatatgatcctggatggtgatggcaggactgtgtactgacttcgaataggtacccggggatcctctagtgccgtgggtcgtttaagctgccgctgtacctgtgtcgtctggtgccttctggtgtacctgggaggttgtcgtctatcaagtatctgtggttggtgtcatgagtcagtgagtcccaatactgttcgtgtcctgtgtgcattatacccaaaactgttatgggcaaatcatgaataagcttgatgttcgaacttaaaagtctctgctcaatatggtattatggttgtttttgttcgtctcctaatatttgcctgggatcaaattttattggctggtgttcatttgacctccatgttcttgctaggctccattttttactctacagccataatatgtttgattgtttggtttgttctttgttgtacacctggttctgtcgagcttagttttcgacactggcttacagcttaacatgttgctattttattgggttctgattgctattttattgggttctgattgctagtttttgctgaatccaaaaaccatgttatttatttaagcgatccaggttattattatgatggtggctaagtttttttttttccaagggtaaattttctggattctccagtgtttctgtggccgaattcaatcactagagtcgacctgcaaagcttcggtccgggcctagaaggcccgcgccacttacgcttgattccgatgacttcgtaggttcctagctcaagccgctcgtgtccaagcgtcacttacgattagctaatgattacggcatctaggaccgactagttcttatgtgcttctagtctccaaatgtggttgatagttattttgctctaagatcaacagtaatgaagtataaatcatcgttgtggtgtgctactcggttaattgagcattaacacacacaaacatgacgaggatggtataatctccaaaaatgtgtactttgttaggtgggaccctatagccttgattaatgtgctatgttaggcatgcctggaaacgtgtgacgcatatgttttgtgaacctgttgatattatatgtgcttttatattaccatattttattaaaatactaatatttattactagtaagatataacattctatctagcttaaaaactaaccataaatattccataataactagatttaccaaactaatatactaaatatacataataaatacaaaattaacaagacaataatcaatatttatgagcttaatatatttagacattatggttggtcgacgataatcatgctaacttttcgtaattgcttgattgaaatatgcttagaataatgcctctttgttctacatggcaaatagggaccattatggtgtaacaccctgggaaccacaaacaccccgaaatgctactaaactacacaactaaccttcatatataaaatttcgacagcatctcctttgaaaatttgcatagacgtggaagcaacagagtataaacagatctgcgtttaaacgtgcaagcgctactagacaattcagtacattaaaaacgtccgcaatgtgttattaagttgtctaagcgtcaatttgtttacaccacaatatatcctgcca

SEQ ID NO: 156 - DNA, 21414 bp, unidentified
  source 1..21414: mol_type = other DNA; note = Artificial
gtttacccgccaatatatcctgtcaaacactgcggccgcacttgaccgcggatggagccggagctgtggtgaggccatcgacgggaggtgggggagaacacagtctcagtgttctttgtgagtccgcaaggtttttagcttttctgtattaattaaggttgctgttggctgtagaatacggtcgtggaagagctgtatcggtagctactacgtaagctattatatactggaagtctggagctcgtcgatctccggtcgtcttcctccatttctcctcgtcttgctttgactgctgctaccatttgcttctgttttctgatgaagcatgccatgtcggccaccagtgtttgtgtggtttttgcagggaatggctttcaagtgctgtgattgaatggccctcgtcgtcctcggctgagctcacatggacgcgtcatgtgagtgagatatatgatcatatgatgagtggggttcgggtgagtgcgtacttgaagtaggatcccgctttcactcattcattcattggcctttaaaccgggaaattttcgcgaggagatggagggaagcaagcagggtgacgagtgcagagtgccgcgagcgctttgtcaaaaggcaccgccgtaggcaaaaaaatcaatggccctgactgactcgatggtagtactactgtagagactagagagggttgctccccatatcttcgtgtgacttttactccagcattgcatttccgtcattgagacgttaattaatagcagctttcgggacagatgactgtggccatgtttcgtcacggccgcttcgtgccagctgggggtactatagtactgtgattttgttagtaaaaactttcattaggccaccattgacgaccgggccttcgcttttgctgcgctaattaaccatttcccggcgaccgaagggaacatgaacatgccccgacacatgagggcatgaggactagtgttctccctgtcgttcgttgacttgactagtgatagtttaaacgctcttcaactggaagagcggttactaccggttcactagctagctgctaatcgagctagttaccctatgaggtgacatgaagcgctcacggttactatgacggttagcttcacgactgttggtggcagtagcgtacgacttagctatagttccggacttacctagctaataacttcgtatagcatacattatacgaagttatggttaccgccctggccgaagctttccggacttacccttaagcgatttaaatcctgaggcctgcaacactgatagtttaaactgaaggcgggaaacgacaatctgatcatgagcggagaattaagggagtcacgttatgacccccgccgatgacgcgggacaagccgttttacgtttggaactgacagaaccgcaacgattgaaggagccactcagccgcgggtttctggagtttaatgagctaagcacatacgtcagaaaccattattgcgcgttcaaaagtcgcctaaggtcactatcagctagcaaatatttcttgtcaaaaatgctccactgacgttccataaattcccctcggtatccaattagagtctcatattcactcccatggcggccaatgcgggcggcggtggagcgggaggaggcagcggcagcggcagcgtggctgcgccggcggtgtgccgccccagcggctcgcggtggacgccgacgccggagcagatcaggatgctgaaggagctctactacggctgcggcatccggtcgcccagctcggagcagatccagcgcatcaccgccatgctgcggcagcacggcaagatcgagggcaagaacgtcttctactggttccagaaccacaaggcccgcgagcgccagaagcgccgcctcaccagcctcgacgtcaacgtgcccgccgccggcgcggccgacgccaccaccagccaactcggcgtcctctcgctgtcgtcgccgccgccttcaggcgcggcgcctccctcgcccaccctcggcttctacgccgccggcaatggcggcggatcggctgtgctgctggacacgagttccgactggggcagcagcggcgctgctatggccaccgagacatgcttcctgcaggactacatgggcgtgacggacacgggcagctcgtcgcagtggccacgcttctcgtcgtcggacacgataatggcggcggccgcggcgcgggcggcgacgacgcgggcgcccgagacgctccctctcttcccgacctgcggcgacgacggcggcagcggtagcagcagctacttgccgttctggggtgccgcgtccacaactgccggcgccacttcttccgttgcgatccaacagcaacaccagctgcaggagcagtacagcttttacagcaacagcaacagcacccagctggccggcaccggcaaccaagacgtatcggcaacagcagcagcagccgccgccctggagctgagcctcagctcatggtgctccccttaccctgctgcagggagtatgtgagagcaacgcgagctgccactgctcttcactgatgtctctggaatggaaggaggaggaagtgagaacagatcattcgacaaagcagcattagtccgttgatcggtggaagaccactcgtcagtgttgagttgaatgtttgatcaataaaatacggcaatgctgtaagggttgttttttatgccattgataatacactgtactgttcagttgttgaactctatttcttagccatgccaagtgcttttcttattttgaataacattacagcaaaaagttgaaagacaaaaaaaaaaacccccgaacagagtgctttgggtcccaagcttctttagactgtgttcggcgttccccctaaatttctccccctatatctcactcacttgtcacatcagcgttctctttccccctatatctccacgctctacagcagttccacctatatcaaacctctataccccaccacaacaatattatatactttcatcttcaactaactcatgtaccttccaatttttttctactaataattatttacgtgcacagaaacttagcaaggagagagagagcgggaatttaaatgctcggcgttaggcttttagtccgctaggtggctagaccgaggttaggacgctagttcactaggggcctagtggtgttttaagacgtcacggtcaccgcggccgcatcgagcagctggcttgtggggaccagacaaaaaaggaatggtgcagaattgttaggcgcacctaccaaaagcatctttgcctttattgcaaagataaagcagattcctctagtacaagtggggaacaaaataacgtggaaaagagctgtcctgacagcccactcactaatgcgtatgacgaacgcagtgacgaccacaaaactcgagcaacgagatcatgagccaatcaaagaggagtgatgtagacctaaagcaataatggagccatgacgtaagggcttacgcccatacgaaataattaaaggctgatgtgacctgtcggtctctcagaacctttactttttatgtttggcgtgtatttttaaatttccacggcaatgacgatgtgaccgtcgacccactaaaacattgctttgtcaaaagctaaaaaagatgatgcccgacagccacttgtgtgaagcatgagaagccggtccctccactaagaaaattagtgaagcatcttccagtggtccctccactcacagctcaatcagtgagcaacaggacgaaggaaatgacgtaagccatgacgtctaatcccattcgaaacgcgtggaccgaagcttgcatgcctgcagtgcagcgtgacccggtcgtgcccctctctagagataatgagcattgcatgtctaagttataaaaaattaccacatattttttttgtcacacttgtttgaagtgcagtttatctatctttatacatatatttaaactttactctacgaataatataatctatagtactacaataatatcagtgttttagagaatcatataaatgaacagttagacatggtctaaaggacaattgagtattttgacaacaggactctacagttttatctttttagtgtgcatgtgttctcctttttttttgcaaatagcttcacctatataatacttcatccattttattagtacatccatttagggtttagggttaatggtttttatagactaatttttttagtacatctattttattctattttagcctctaaattaagaaaactaaaactctattttagtttttttatttaataatttagatataaaatagaataaaataaagtgactaaaaattaaacaaataccctttaagaaattaaaaaaactaaggaaacatttttcttgtttcgagtagataatgccagcctgttaaacgccgtcgacgagtctaacggacaccaaccagcgaaccagcagcgtcgcgtcgggccaagcgaagcagacggcacggcatctctgtcgctgcctctggacccctctcgagagttccgctccaccgttggacttgctccgctgtcggcatccagaaattgcgtggcggagcggcagacgtgagccggcacggcaggcggcctcctcctcctctcacggcaccggcagctacgggggattcctttcccaccgctccttcgctttcccttcctcgcccgccgtaataaatagacaccccctccacaccctctttccccaacctcgtgttgttcggagcgcacacacacacaaccagatctcccccaaatccacccgtcggcacctccgcttcaaggtacgccgctcgtcctcccccccccccctctctaccttctctagatcggcgttccggtccatgcatggttagggcccggtagttctacttctgttcatgtttgtgttagatccgtgtttgtgttagatccgtgctgctagcgttcgtacacggatgcgacctgtacgtcagacacgttctgattgctaacttgccagtgtttctctttggggaatcctgggatggctctagccgttccgcagacgggatcgatttcatgattttttttgtttcgttgcatagggtttggtttgcccttttcctttatttcaatatatgccgtgcacttgtttgtcgggtcatcttttcatgcttttttttgtcttggttgtgatgatgtggtctggttgggcggtcgttctagatcggagtagaattctgtttcaaactacctggtggatttattaattttggatctgtatgtgtgtgccatacatattcatagttacgaattgaagatgatggatggaaatatcgatctaggataggtatacatgttgatgcgggttttactgatgcatatacagagatgctttttgttcgcttggttgtgatgatgtggtgtggttgggcggtcgttcattcgttctagatcggagtagaatactgtttcaaactacctggtgtatttattaattttggaactgtatgtgtgtgtcatacatcttcatagttacgagtttaagatggatggaaatatcgatctaggataggtatacatgttgatgtgggttttactgatgcatatacatgatggcatatgcagcatctattcatatgctctaaccttgagtacctatctattataataaacaagtatgttttataattattttgatcttgatatacttggatgatggcatatgcagcagctatatgtggatttttttagccctgccttcatacgctatttatttgcttggtactgtttcttttgtcgatgctcaccctgttgtttggtgttacttctgcaggtcgactttaacttagcctaggatccatggccactgtgaacaactggctcgctttctccctctccccgcaggagctgccgccctcccagacgacggactccacactcatctcggccgccaccgccgaccatgtctccggcgatgtctgcttcaacatcccccaagattggagcatgaggggatcagagctttcggcgctcgtcgcggagccgaagctggaggacttcctcggcggcatctccttctccgagcagcatcacaaggccaactgcaacatgatacccagcactagcagcacagtttgctacgcgagctcaggtgctagcaccggctaccatcaccagctgtaccaccagcccaccagctcagcgctccacttcgcggactccgtaatggtggcttcctcggccggtgtccacgacggcggtgccatgctcagcgcggccgccgctaacggtgtcgctggcgctgccagtgccaacggcggcggcatcgggctgtccatgattaagaactggctgcggagccaaccggcgcccatgcagccgagggtggcggcggctgagggcgcgcaggggctctctttgtccatgaacatggcggggacgacccaaggcgctgctggcatgccacttctcgctggagagcgcgcacgggcgcccgagagtgtatcgacgtcagcacagggtggagccgtcgtcgtcacggcgccgaaggaggatagcggtggcagcggtgttgccggcgctctagtagccgtgagcacggacacgggtggcagcggcggcgcgtcggctgacaacacggcaaggaagacggtggacacgttcgggcagcgcacgtcgatttaccgtggcgtgacaaggcatagatggactgggagatatgaggcacatctttgggataacagttgcagaagggaagggcaaactcgtaagggtcgtcaagtctatttaggtggctatgataaagaggagaaagctgctagggcttatgatcttgctgctctgaagtactggggtgccacaacaacaacaaattttccagtgagtaactacgaaaaggagctcgaggacatgaagcacatgacaaggcaggagtttgtagcgtctctgagaaggaagagcagtggtttctccagaggtgcatccatttacaggggagtgactaggcatcaccaacatggaagatggcaagcacggattggacgagttgcagggaacaaggatctttacttgggcaccttcagcacccaggaggaggcagcggaggcgtacgacatcgcggcgatcaagttccgcggcctcaacgccgtcaccaacttcgacatgagccgctacgacgtgaagagcatcctggacagcagcgccctccccatcggcagcgccgccaagcgcctcaaggaggccgaggccgcagcgtccgcgcagcaccaccacgccggcgtggtgagctacgacgtcggccgcatcgcctcgcagctcggcgacggcggagccctggcggcggcgtacggcgcgcactaccacggcgccgcctggccgaccatcgcgttccagccgggcgccgccagcacaggcctgtaccacccgtacgcgcagcagccaatgcgcggcggcgggtggtgcaagcaggagcaggaccacgcggtgatcgcggccgcgcacagcctgcaggacctccaccacctgaacctgggcgcggccggcgcgcacgactttttctcggcagggcagcaggccgccgccgctgcgatgcacggcctgggtagcatcgacagtgcgtcgctcgagcacagcaccggctccaactccgtcgtctacaacggcggggtcggcgacagcaacggcgccagcgccgtcggcggcagtggcggtggctacatgatgccgatgagcgctgccggagcaaccactacatcggcaatggtgagccacgagcaggtgcatgcacgggcctacgacgaagccaagcaggctgctcagatggggtacgagagctacctggtgaacgcggagaacaatggtggcggaaggatgtctgcatgggggactgtcgtgtctgcagccgcggcggcagcagcaagcagcaacgacaacatggccgccgacgtcgggcatggcggcgcgcagctcttcagtgtctggaacgacacttaagcgtacctagtggtacctgacatcttatagtctgcaacctctcgtgtctgaattcctatctttatcaagtgttattgcttccacgactataggacagctttcgtcgaaagcttttgctcatgtgatctcgaaggattcatctagtctgatttttcgtgacttgtatcggttttattggattcatccaacatatatcaataaaaaatgagttgtgtttcctttcttcctagttcagttaaaattatttccctcctgcgcttgtgctgtaattgtctgtgtacctgttgtttgtgactgtgttagttcccttggatatgatttcgtatttgatatgtacatggagatagcttagcttcattattggagtatgaagttagtatgacatagtcactctcctggaaaattgacactgcaaaccatatttttattctgaaccacaaatcctagtcagtccgctggcatatgccgtccgtttgctgaatccagaacgtgggtttggagatgtacggctgagatgcctctatgcgaaggggatttcgtggtgaaacgagatgggagtagagcaacgcccgtggaagatgcttcaaacttccacacttttgagcaacgatcggcagtagtaaggtagacgatttcaagatcaaagcatatgaagataaacaacatcaacaacaaaatttgttggggttctatagagagaaacagagctacatacatacactgttttgtatctaccatctgagatgatgaaaagatgaaaaactaaagaatgccccggcgccaacgccaggacacgccgcgcgcgcgtcacccgagccatctcttgacccagccggcgctgtatatttacacacgttgcagcatcgatcaccacctgttcgatcgcgtcgccgtcaccggcgcgccgcgacttattgaactagtctagggcgcggctaacaacctagcttagattgccttgtctaaacccttaggctaacgcgccactctagaaggccgatctcccccgaacgcgccagatccgatatcgatgggccctggccgaagcttggtcacccggtccgggcctagaaggccgatctcccgggcacccagctttcttgtacaaagtggccgttaacggatcggccagaatggcccggaccgggttaccccgcgggaaaaacacacatacacctatcgtagtattatgggacaaattcatgaaattttgtgacatgacatacataaacagtcactcgtatctcagagtcaacctgtgattttccatcttcctaccatcagacaacattctctgtcacgtcttgaataaacttttgcaaagccacctgcgaggatccaccgtccatcgacgccacgtgacacttctcagccatctccttcactctattcctaacctcactatcattctccatcacacacctgaccgctctctctatatccaccgtcgtgactatctccatccctccgaccaacatatctcctctaaagaacttccgtatctgaaccgccaatcccaactcctccaccatcgcaaaggcgcttatcttctgctctgcgtaaagcggccacgtcaccactgttaaacattttcaaagcatgaggttcaagctcagcaactgtatttaccaatatacctttcatctttcgaaaacatctgaattcgagctcggtaccctggttcacaaactcaatacaacacacagtggagtagggtattacgctccggcggcccgaaccactctaaatccttgtgtcctcgtgtgctcttccaccattaatgactgtaattgcagggacacgaagagttgtagcgcttttgccaacaagatccgctatatgctagtagagtggaacctgcacagcaacaagcatccaataatctgagaataagaattatgtgtggtgatggttctcatctctgcaactcgccattttcgcgagagaaccaaatccaagttggtgaagatcatgatttgggctcatgggctggcatagtagctattacctttgcaattgtggttcgaatctatccgatattctccttttcagggagagctaatgcttatgcttattgggtattttggtttgacactgcttcacgcccaaaaaaaggcaactatgtctgagttggatatggcccaaaaaaaggcagctatgtctgagttggatatggaagtcttctttcgtttagggtgaagtaagaccaagctcatgagcttattatcttaggtcggaacaaattagttgataggcatggcacatttatcaaattataatgattttaacagaaaagcaacacctctttttcagcagcaccagctttgcaagctgcaattgacactccaagcatagtatttgctccaaactcagcctgcatttcgcacaatatcatatctatttccatttggataaaatatattttccagaaatatgggaacagaatcaagatacagaaaaaagttgtggtagtagtggtaagtggaaacacaagtacagtgaaaagatagcattatttctgaacagtcaaattaaccgaaataagtagtatcacatactgcccctaaattgactacacccaatgtaaagaattgcttgagcatattgagccatcagttgtttgtttgtgtaacggatttgacaatgcagagttcaggagcaaaaaaccgcaaaggagagaaagagggaaaggatctcctagtatcccaccttgtggcgcgccctgtcaagtgcatgatggcctggtcgatctgcgtctgctgctgcggttccatcccaacgagtgcctccgacaccttgtcgttgatcacccgcaccgcgtaggcgacccccctggcgaggaacttccgcctctcggaggccccggccgcgtcggcggcggcgccctcgagcgcgcccacgctagccgtagatgctcggtgcacggccttgttggtgtgcaactcgacctcaacggccggtgcgctacgcccgtcaaggatctggcgcgcccgcaccctcgtgatcacggtgggcgcctcccgcctcatgtggccgacgatgaaaagcgccgggttaggggccttggcgcgcaccgccgtattcagggcctcctcgctcttgcgcgagagcaggtgcttccccaggtactcctgcactgacaaggctgccacagcggtggaatttgtcctcacgacttcgccacgtcgtcctcacctccctggcttcccacgactccgccgtatcgaggtgctcggtgggtcgtcttaatccgaagtccgaactaggaagacgagacagagaggtctgaggaatgggcctcgtttgatgttgagctgaattatttttccagcataagcccaggtcttggtccatgaacaaaattactagaaacccagcccagtactacgatctaaaagagggactgccactggatagctctctctagcattctccacgctccaatacagcggcgtcgtgtctatccgggtctatccgcgaacacgtgagaactctccagaaactgctttctcctccacttcatctctctcgctttccctctataaaaagaccccttctaggaattgagggagacagcaagcaccaagcagcgatccgaagctcaatcaattcactcaaacctcttccccaaatcttcgattagatcttcgttgacaagaagactagaaccgaacctgacatgtccaacctgctcacggttcaccagaaccttccggctcttccagtggacgcgacgtccgatgaagtcaggaagaacctcatggacatgttccgcgacaggcaagcgttcagcgagcacacctggaagatgctgctctccgtctgccgctcctgggctgcatggtgcaagctgaacaacaggaagtggttccccgctgagcccgaggacgtgagggattaccttctgtacctgcaagcgcgaggtttgtttctgcttctacctttgatatatatataataattatcattaattagtagtaatataatatttcaaatatttttttcaaaataaaagaatgtagtatatagcaattgcttttctgtagtttataagtgtgtatattttaatttataacttttctaatatatgaccaaaacatggtgatgcctaggtctggcagtgaagaccatccagcaacaccttggacaactgaacatgcttcacaggcgctccggcctcccgcgccccagcgactcgaacgccgtgagcctcgtcatgcgccgcatcaggaaggaaaacgtcgatgccggcgaaagggcaaagcaggccctcgcgttcgagaggaccgatttcgaccaggtccgcagcctgatggagaacagcgacaggtgccaggacattaggaacctggcgttcctcggaattgcatacaacacgctcctcaggatcgcggaaattgcccgcattcgcgtgaaggacattagccgcaccgacggcggcaggatgcttatccacattggcaggaccaagacgctcgtttccaccgcaggcgtcgaaaaggccctcagcctcggagtgaccaagctcgtcgaacgctggatctccgtgtccggcgtcgcggacgacccaaacaactacctcttctgccgcgtccgcaagaacggggtggctgcccctagcgccaccagccaactcagcacgagggccttggaaggtattttcgaggccacccaccgcctgatctacggcgcgaaggatgacagcggtcaacgctacctcgcatggtccgggcactccgcccgcgttggagctgctagggacatggcccgcgccggtgtttccatccccgaaatcatgcaggcgggtggatggacgaacgtgaacattgtcatgaactacattcgcaaccttgacagcgagacgggcgcaatggttcgcctcctggaagatggtgactgaggtacccaacctagacttgtccatcttctggattggccaacttaattaatgtatgaaataaaaggatgcacacatagtgacatgctaatcactataatgtgggcatcaaagttgtgtgttatgtgtaattactagttatctgaataaaagagaaagagatcatccatatttcttatcctaaatgaatgtcacgtgtctttataattctttgatgaaccagatgcatttcattaaccaaatccatatacatataaatattaatcatatataattaatatcaattgggttagcaaaacaaatctagtctaggtgtgttttgcgatccgataatcgatgggtctaaaaacggcccctaactaacgcttagttgcccgctagattagtcccccgttagtgcctagttagacacacgacgaactaggggctagcacgcgttagataacttcgtatagcatacattatacgaagttattccggaccgggttaccgaattcaattcctgcccttaaggccaattgttcaagattcattcaacaattgaaacatctcccatgattaaatcagtataaggttgctatggtcttgcttgacaaagtttttttttgagggaatttcaactaaatttttgagtgaaactatcaaatactgattttaaaaaatttttataaaaggaagcgcagagataaaaggccatctatgctacaaaagtacccaaaaatgtaatcctaaagtatgaattgcattttttttttgtttggacgaaaggaaaggagtattaccacaagaatgatatcatcttcatatttagatcttttttgggtaaagcttgagattctctaaatatagagaaatcagaagaaaaaaaaaccgtgttttggtggttttgatttctagcctccacaataactttgacggcgtcgacaagtctaacggacaccaagcagcgaaccaccagcgccgagccaagcgaagcagacggccgagacgttgacaccttcggcgcggcatctctcgagagttccgctccggcgctccacctccaccgctggcggtttcttattccgttccgttccgcctcctgctctgctcctctccacaccacacggcacgaaaccgttacggcaccggcagcacccagcacgggagaggggattcctttcccaccgttccttccctttccgccccgccgctataaatagccagccccatccccagcttttttccccaatctcatctcctctctcctgttgttcggagcacacgcacaatccgatcgatccccaaatccccttcgtctctcctcgcgagcctcgtggatcccagcttcaaggtacggcgatcgatcatcccccctccttctctctaccttcttttctctagactacatcggatggcgatccatggttagggcctgctagtttcccttcctgttttgtcgatggctgcgaggcacaatagatctgatggcgttatgacggctaacttgtcatgttgttgcgatttatagtccctttaggagatcagtttaatttctcggatggttcgagatcggtggtccatggttagtaccctaagatccgcgctgttagggttcgtagatggaggcgacctgttctgattgttaacttgtcagtacctgggaaatcctgggatggttctagctcgtccgcagatgagatcgatttcatgatcctctgtatcttgtttcgttgcctaggttccgtctaatctatccgtggtatgatgtagatgttttgatcgtgctaactacgtcttgtaaagttaattgtcaggtcataatttttagcatgcctttttttttgtttggttttgtctaattgggctgtcgttctagatcagagtagaagactgttccaaactacctgctggatttattgaacttggatctgtatgtgtgtcacatatcttcataaattcatgattaagatggattgaaatatcttttatctttttggtatggatagttctatatgttggtgtggctttgttagatgtatacatgcttagatacatgaagcaacgtgctgctactgtttagtaattgctgttcatttgtctaataaacagataaggatatgtatttatgttgctgttggttttgctggtactttgttggatacaaatgcttcaatacagaaaacagcatgctgctacgatttaccatttatctaatcttatcatatgtctaatctaataaacaaacatgcttttaaattatcttcatatgcttggatgatggcatacacagcggctatgtgtggttttttaaatacccagcatcatgggcatgcatgacactgctttaatatgctttttatttgcttgagactgtttcttttgtttatactgaccctttagttcggtgactcttctgcaggtcgactttaacttagcctaggatccatggcccagtccaagcacggcctgaccaaggagatgaccatgaagtaccgcatggagggctgcgtggacggccacaagttcgtgatcaccggcgagggcatcggctaccccttcaagggcaagcaggccatcaacctgtgcgtggtggagggcggccccttgcccttcgccgaggacatcttgtccgccgccttcatgtacggcaaccgcgtgttcaccgagtacccccaggacatcgtcgactacttcaagaactcctgccccgccggctacacctgggaccgctccttcctgttcgaggacggcgccgtgtgcatctgcaacgccgacatcaccgtgagcgtggaggagaactgcatgtaccacgagtccaagttctacggcgtgaacttccccgccgacggccccgtgatgaagaagatgaccgacaactgggagccctcctgcgagaagatcatccccgtgcccaagcagggcatcttgaagggcgacgtgagcatgtacctgctgctgaaggacggtggccgcttgcgctgccagttcgacaccgtgtacaaggccaagtccgtgccccgcaagatgcccgactggcacttcatccagcacaagctgacccgcgaggaccgcagcgacgccaagaaccagaagtggcacctgaccgagcacgccatcgcctccggctccgccttgccctccggactcagatctcgatagggtaccaatggccagttaacagatccagctgctgctgttctagggttcacaagtctgcctatttgtcttccccaatggagctatggttgtctggtctggtccttggtcgtgtcccgtttcattgtgtactatttacctgtaatgtgtatccttaagtctggtttgatggtgtctgaaacgttttgctgtggtagagcagcatggaagaactataatgaataagtgatccctaatcattgtgtccaaattttgcttctgctatacccttttgtgctgtttcttatgttttgcttaaaaatttgatctgacaaacaaatttgtctaaattatgctcttgttctgactgtgtactgtacacatttgtattgctaccggtttggcacatagttttctctttgattgcagatcaaacccttctgattgcagattgcttggctatggctgatgtgctcactgttcttctttagcttgtatattgctgatggtggcttggctacggctgaaaaagttgctgctgcgccgacttggcaactgttgctccagtaatgctttgtcctctcttcctagccgccgacttggcacttggcagctgttgctcctgtaatgcgttgttatctcttatctcttgagatgtactatgattttgaggctgtttgacttgtgccagattgccagtgctgatgctatattatctcaggtttttatgctagtatatgttttactgtgtgctgcctgtgtcgagttacgtaatctattgaaccgctatgcgtgttgatgccctgttgttgcttgccagattgatgcccctgttgcttgcagcttgcaagctgtagtgaaatcctaaaattcgaaaccaaatctattctgaacttttgaagatctgtgatgtccggaagaaaagattcaaacagataaacgggactctccagaatctataaaataaatgatcgacaaacgctttgctttggtaggcttcctagttagttagcggaccgaagcttcggtccgggcctagaaggccagcttcggccgcccctcggtaccctgggatctgcccttactttaacgcctctaaccaacacccctttatctttataaggaacaataaacagaatttgccccactgttctaaatcacctaataatatccccagctaaaaacaataaaggtttcctagaattaagacaagcatgactgttcctccaggagggtttggaacattgttgcagtcttgcagatacgggcgaagggtgagaaacagagcggagggctggaggtgacctcggtagtcgacgccggagttgagcttgacaacgacggggcggcccctgatggacttgaggaagtccgatggcgtcttcaccgtcccgccggcgcccgaggcgggcctgtcgctgccgccgccgccgctgctcatcttgcgcgctgtgcccccggcggtgtccctgtgttgcggatcgcgggtgggccaggtggatgcgagggcgacccgtttggactccggccggagccgccggatccctggtcggtgtcagtgccgtttactctgggccccacgtgtcagtaccgtctgtagatgacaacaacccgtcgtccacagtcatgtccaaaatatcctttcttcttttttttcgattcggatatctatcttccttttttttttccaaaaatcttcttgacgcaccagcgcgcacgtttgtggtaaacgccgacacgtcggtcccacgtcgatagaccccacccaccagtgagtagcgtgtacgtattcgggggtgacggacgtgtcgccgtcgtcttgctagtcccattcccatctgagccacacatctctgaacaaaaaaaaggagggaggcctccacgcacatccccctccgtgccacccgccccaaaccctcgcgccgcctccgagacagccgccgcaaccatggccaccgccgccgccgcgtctaccgcgctcactggcgccactaccgctgcgcccaaggcgaggcgccgggcgcacctcctggccacccgccgcgccctcgccgcgcccatcaggtgctcagcggcgtcacccgccatgccgatggctcccccggccaccccgctccggccgtggggccccaccgagccccgcaagggtgctgacatcctcgtcgagtccctcgagcgctgcggcgtccgcgacgtcttcgcctaccccggcggcgcgtccatggagatccaccaggcactcacccgctcccccgtcatcgccaaccacctcttccgccacgagcaaggggaggcctttgccgcctccggctacgcgcgctcctcgggccgcgtcggcgtctgcatcgccacctccggccccggcgccaccaacctagtctccgcgctcgccgacgcgctgctcgattccgtccccatggtcgccatcacgggacaggtggcgcgacgcatgattggcaccgacgccttccaggagacgcccatcgtcgaggtcacccgctccatcaccaagcacaactacctggtcctcgacgtcgacgacatcccccgcgtcgtgcaggaggctttcttcctcgcctcctctggtcgaccagggccggtgcttgtcgacatccccaaggacatccagcagcagatggcggtgcctgtctgggacaagcccatgagtctgcctgggtacattgcgcgccttcccaagccccctgcgactgagttgcttgagcaggtgctgcgtcttgttggtgaatcgcggcgccctgttctttatgtgggcggtggctgcgcagcatctggtgaggagttgcgacgctttgtggagctgactggaatcccggtcacaactactcttatgggcctcggcaacttccccagcgacgacccactgtctctgcgcatgctaggtatgcatgggacggtgtatgcaaattatgcagtggataaggccgatctgttgcttgcacttggtgtgcggtttgatgatcgcgtgacagggaagattgaggcttttgcaagcagggctaagattgtgcacgttgatattgatccggctgagattggcaagaacaagcagccacatgtgtccatctgtgcagatgttaagcttgctttgcagggcatgaatgctcttcttgaaggaagcacatcaaagaagagctttgactttggctcatggaacgatgagttggatcagcagaagagggaattcccccttgggtataaaacatctaatgaggagatccagccacaatatgctattcaggttcttgatgagctgacgaaaggcgaggccatcatcggcacaggtgttgggcagcaccagatgtgggcggcacagtactacacttacaagcggccaaggcagtggttgtcttcagctggtcttggggctatgggatttggtttgccggctgctgctggtgcttctgtggcaaacccaggtgtcactgttgttgacatcgatggagatggtagctttctcatgaacgttcaggagctagctatgatccgaattgagaacctcccagtgaaggtctttgtgctaaacaaccagcacctggggatggtggtgcagttggaggacaggttctataaggccaacagagcgcacacatacttgggaaacccagagaatgaaagtgagatatatccagatttcgtgacgatcgccaaagggttcaacattccagccgtccgtgtgacaaagaagaacgaagtccgcgcagcgataaagaagatgctcgagactccagggccgtacctcttggatataatcgtcccacaccaggagcatgtgttgcctatgatccctagtggtggggctttcaaggatatgatcctggatggtgatggcaggactgtgtactgacttcgaataggtacccggggatcctctagtgccgtgggtcgtttaagctgccgctgtacctgtgtcgtctggtgccttctggtgtacctgggaggttgtcgtctatcaagtatctgtggttggtgtcatgagtcagtgagtcccaatactgttcgtgtcctgtgtgcattatacccaaaactgttatgggcaaatcatgaataagcttgatgttcgaacttaaaagtctctgctcaatatggtattatggttgtttttgttcgtctcctaatatttgcctgggatcaaattttattggctggtgttcatttgacctccatgttcttgctaggctccattttttactctacagccataatatgtttgattgtttggtttgttctttgttgtacacctggttctgtcgagcttagttttcgacactggcttacagcttaacatgttgctattttattgggttctgattgctattttattgggttctgattgctagtttttgctgaatccaaaaaccatgttatttatttaagcgatccaggttattattatgatggtggctaagtttttttttttccaagggtaaattttctggattctccagtgtttctgtggccgaattcaatcactagagtcgacctgcaaagcttcggtccgggcctagaaggcccgcgccacttacgcttgattccgatgacttcgtaggttcctagctcaagccgctcgtgtccaagcgtcacttacgattagctaatgattacggcatctaggaccgactagttcttatgtgcttctagtctccaaatgtggttgatagttattttgctctaagatcaacagtaatgaagtataaatcatcgttgtggtgtgctactcggttaattgagcattaacacacacaaacatgacgaggatggtataatctccaaaaatgtgtactttgttaggtgggaccctatagccttgattaatgtgctatgttaggcatgcctggaaacgtgtgacgcatatgttttgtgaacctgttgatattatatgtgcttttatattaccatattttattaaaatactaatatttattactagtaagatataacattctatctagcttaaaaactaaccataaatattccataataactagatttaccaaactaatatactaaatatacataataaatacaaaattaacaagacaataatcaatatttatgagcttaatatatttagacattatggttggtcgacgataatcatgctaacttttcgtaattgcttgattgaaatatgcttagaataatgcctctttgttctacatggcaaatagggaccattatggtgtaacaccctgggaaccacaaacaccccgaaatgctactaaactacacaactaaccttcatatataaaatttcgacagcatctcctttgaaaatttgcatagacgtggaagcaacagagtataaacagatctgcgtttaaacgtgcaagcgctactagacaattcagtacattaaaaacgtccgcaatgtgttattaagttgtctaagcgtcaatttgtttacaccacaatatatcctgcca

SEQ ID NO: 157 - DNA, 21414 bp, unidentified
  source 1..21414: mol_type = other DNA; note = Artificial
gtttacccgccaatatatcctgtcaaacactgcggccgcacttgaccgcggatggagccggagctgtggtgaggccatcgacgggaggtgggggagaacacagtctcagtgttctttgtgagtccgcaaggtttttagcttttctgtattaattaaggttgctgttggctgtagaatacggtcgtggaagagctgtatcggtagctactacgtaagctattatatactggaagtctggagctcgtcgatctccggtcgtcttcctccatttctcctcgtcttgctttgactgctgctaccatttgcttctgttttctgatgaagcatgccatgtcggccaccagtgtttgtgtggtttttgcagggaatggctttcaagtgctgtgattgaatggccctcgtcgtcctcggctgagctcacatggacgcgtcatgtgagtgagatatatgatcatatgatgagtggggttcgggtgagtgcgtacttgaagtaggatcccgctttcactcattcattcattggcctttaaaccgggaaattttcgcgaggagatggagggaagcaagcagggtgacgagtgcagagtgccgcgagcgctttgtcaaaaggcaccgccgtaggcaaaaaaatcaatggccctgactgactcgatggtagtactactgtagagactagagagggttgctccccatatcttcgtgtgacttttactccagcattgcatttccgtcattgagacgttaattaatagcagctttcgggacagatgactgtggccatgtttcgtcacggccgcttcgtgccagctgggggtactatagtactgtgattttgttagtaaaaactttcattaggccaccattgacgaccgggccttcgcttttgctgcgctaattaaccatttcccggcgaccgaagggaacatgaacatgccccgacacatgagggcatgaggactagtgttctccctgtcgttcgttgacttgactagtgatagtttaaacgctcttcaactggaagagcggttactaccggttcactagctagctgctaatcgagctagttaccctatgaggtgacatgaagcgctcacggttactatgacggttagcttcacgactgttggtggcagtagcgtacgacttagctatagttccggacttacctagctaataacttcgtatagcatacattatacgaagttatggttaccgccctggccgaagctttccggacttacccttaagcgatttaaatcctgaggcctgcaacactgatagtttaaactgaaggcgggaaacgacaatctgatcatgagcggagaattaagggagtcacgttatgacccccgccgatgacgcgggacaagccgttttacgtttggaactgacagaaccgcaacgattgaaggagccactcagccgcgggtttctggagtttaatgagctaagcacatacgtcagaaaccattattgcgcgttcaaaagtcgcctaaggtcactatcagctagcaaatatttcttgtcaaaaatgctccactgacgttccataaattcccctcggtatccaattagagtctcatattcactcccatggcggccaatgcgggcggcggtggagcgggaggaggcagcggcagcggcagcgtggctgcgccggcggtgtgccgccccagcggctcgcggtggacgccgacgccggagcagatcaggatgctgaaggagctctactacggctgcggcatccggtcgcccagctcggagcagatccagcgcatcaccgccatgctgcggcagcacggcaagatcgagggcaagaacgtcttctactggttccagaaccacaaggcccgcgagcgccagaagcgccgcctcaccagcctcgacgtcaacgtgcccgccgccggcgcggccgacgccaccaccagccaactcggcgtcctctcgctgtcgtcgccgccgccttcaggcgcggcgcctccctcgcccaccctcggcttctacgccgccggcaatggcggcggatcggctgtgctgctggacacgagttccgactggggcagcagcggcgctgctatggccaccgagacatgcttcctgcaggactacatgggcgtgacggacacgggcagctcgtcgcagtggccacgcttctcgtcgtcggacacgataatggcggcggccgcggcgcgggcggcgacgacgcgggcgcccgagacgctccctctcttcccgacctgcggcgacgacggcggcagcggtagcagcagctacttgccgttctggggtgccgcgtccacaactgccggcgccacttcttccgttgcgatccaacagcaacaccagctgcaggagcagtacagcttttacagcaacagcaacagcacccagctggccggcaccggcaaccaagacgtatcggcaacagcagcagcagccgccgccctggagctgagcctcagctcatggtgctccccttaccctgctgcagggagtatgtgagagcaacgcgagctgccactgctcttcactgatgtctctggaatggaaggaggaggaagtgagaacagatcattcgacaaagcagcattagtccgttgatcggtggaagaccactcgtcagtgttgagttgaatgtttgatcaataaaatacggcaatgctgtaagggttgttttttatgccattgataatacactgtactgttcagttgttgaactctatttcttagccatgccaagtgcttttcttattttgaataacattacagcaaaaagttgaaagacaaaaaaaaaaacccccgaacagagtgctttgggtcccaagcttctttagactgtgttcggcgttccccctaaatttctccccctatatctcactcacttgtcacatcagcgttctctttccccctatatctccacgctctacagcagttccacctatatcaaacctctataccccaccacaacaatattatatactttcatcttcaactaactcatgtaccttccaatttttttctactaataattatttacgtgcacagaaacttagcaaggagagagagagcgggaatttaaatgctcggcgttaggcttttagtccgctaggtggctagaccgaggttaggacgctagttcactaggggcctagtggtgttttaagacgtcacggtcaccgcggccgcatcgagcagctggcttgtggggaccagacaaaaaaggaatggtgcagaattgttaggcgcacctaccaaaagcatctttgcctttattgcaaagataaagcagattcctctagtacaagtggggaacaaaataacgtggaaaagagctgtcctgacagcccactcactaatgcgtatgacgaacgcagtgacgaccacaaaactcgagcaacgagatcatgagccaatcaaagaggagtgatgtagacctaaagcaataatggagccatgacgtaagggcttacgcccatacgaaataattaaaggctgatgtgacctgtcggtctctcagaacctttactttttatgtttggcgtgtatttttaaatttccacggcaatgacgatgtgaccgtcgacccactaaaacattgctttgtcaaaagctaaaaaagatgatgcccgacagccacttgtgtgaagcatgagaagccggtccctccactaagaaaattagtgaagcatcttccagtggtccctccactcacagctcaatcagtgagcaacaggacgaaggaaatgacgtaagccatgacgtctaatcccattcgaaacgcgtggaccgaagcttgcatgcctgcagtgcagcgtgacccggtcgtgcccctctctagagataatgagcattgcatgtctaagttataaaaaattaccacatattttttttgtcacacttgtttgaagtgcagtttatctatctttatacatatatttaaactttactctacgaataatataatctatagtactacaataatatcagtgttttagagaatcatataaatgaacagttagacatggtctaaaggacaattgagtattttgacaacaggactctacagttttatctttttagtgtgcatgtgttctcctttttttttgcaaatagcttcacctatataatacttcatccattttattagtacatccatttagggtttagggttaatggtttttatagactaatttttttagtacatctattttattctattttagcctctaaattaagaaaactaaaactctattttagtttttttatttaataatttagatataaaatagaataaaataaagtgactaaaaattaaacaaataccctttaagaaattaaaaaaactaaggaaacatttttcttgtttcgagtagataatgccagcctgttaaacgccgtcgacgagtctaacggacaccaaccagcgaaccagcagcgtcgcgtcgggccaagcgaagcagacggcacggcatctctgtcgctgcctctggacccctctcgagagttccgctccaccgttggacttgctccgctgtcggcatccagaaattgcgtggcggagcggcagacgtgagccggcacggcaggcggcctcctcctcctctcacggcaccggcagctacgggggattcctttcccaccgctccttcgctttcccttcctcgcccgccgtaataaatagacaccccctccacaccctctttccccaacctcgtgttgttcggagcgcacacacacacaaccagatctcccccaaatccacccgtcggcacctccgcttcaaggtacgccgctcgtcctcccccccccccctctctaccttctctagatcggcgttccggtccatgcatggttagggcccggtagttctacttctgttcatgtttgtgttagatccgtgtttgtgttagatccgtgctgctagcgttcgtacacggatgcgacctgtacgtcagacacgttctgattgctaacttgccagtgtttctctttggggaatcctgggatggctctagccgttccgcagacgggatcgatttcatgattttttttgtttcgttgcatagggtttggtttgcccttttcctttatttcaatatatgccgtgcacttgtttgtcgggtcatcttttcatgcttttttttgtcttggttgtgatgatgtggtctggttgggcggtcgttctagatcggagtagaattctgtttcaaactacctggtggatttattaattttggatctgtatgtgtgtgccatacatattcatagttacgaattgaagatgatggatggaaatatcgatctaggataggtatacatgttgatgcgggttttactgatgcatatacagagatgctttttgttcgcttggttgtgatgatgtggtgtggttgggcggtcgttcattcgttctagatcggagtagaatactgtttcaaactacctggtgtatttattaattttggaactgtatgtgtgtgtcatacatcttcatagttacgagtttaagatggatggaaatatcgatctaggataggtatacatgttgatgtgggttttactgatgcatatacatgatggcatatgcagcatctattcatatgctctaaccttgagtacctatctattataataaacaagtatgttttataattattttgatcttgatatacttggatgatggcatatgcagcagctatatgtggatttttttagccctgccttcatacgctatttatttgcttggtactgtttcttttgtcgatgctcaccctgttgtttggtgttacttctgcaggtcgactttaacttagcctaggatccatggccactgtgaacaactggctcgctttctccctctccccgcaggagctgccgccctcccagacgacggactccacactcatctcggccgccaccgccgaccatgtctccggcgatgtctgcttcaacatcccccaagattggagcatgaggggatcagagctttcggcgctcgtcgcggagccgaagctggaggacttcctcggcggcatctccttctccgagcagcatcacaaggccaactgcaacatgatacccagcactagcagcacagtttgctacgcgagctcaggtgctagcaccggctaccatcaccagctgtaccaccagcccaccagctcagcgctccacttcgcggactccgtaatggtggcttcctcggccggtgtccacgacggcggtgccatgctcagcgcggccgccgctaacggtgtcgctggcgctgccagtgccaacggcggcggcatcgggctgtccatgattaagaactggctgcggagccaaccggcgcccatgcagccgagggtggcggcggctgagggcgcgcaggggctctctttgtccatgaacatggcggggacgacccaaggcgctgctggcatgccacttctcgctggagagcgcgcacgggcgcccgagagtgtatcgacgtcagcacagggtggagccgtcgtcgtcacggcgccgaaggaggatagcggtggcagcggtgttgccggcgctctagtagccgtgagcacggacacgggtggcagcggcggcgcgtcggctgacaacacggcaaggaagacggtggacacgttcgggcagcgcacgtcgatttaccgtggcgtgacaaggcatagatggactgggagatatgaggcacatctttgggataacagttgcagaagggaagggcaaactcgtaagggtcgtcaagtctatttaggtggctatgataaagaggagaaagctgctagggcttatgatcttgctgctctgaagtactggggtgccacaacaacaacaaattttccagtgagtaactacgaaaaggagctcgaggacatgaagcacatgacaaggcaggagtttgtagcgtctctgagaaggaagagcagtggtttctccagaggtgcatccatttacaggggagtgactaggcatcaccaacatggaagatggcaagcacggattggacgagttgcagggaacaaggatctttacttgggcaccttcagcacccaggaggaggcagcggaggcgtacgacatcgcggcgatcaagttccgcggcctcaacgccgtcaccaacttcgacatgagccgctacgacgtgaagagcatcctggacagcagcgccctccccatcggcagcgccgccaagcgcctcaaggaggccgaggccgcagcgtccgcgcagcaccaccacgccggcgtggtgagctacgacgtcggccgcatcgcctcgcagctcggcgacggcggagccctggcggcggcgtacggcgcgcactaccacggcgccgcctggccgaccatcgcgttccagccgggcgccgccagcacaggcctgtaccacccgtacgcgcagcagccaatgcgcggcggcgggtggtgcaagcaggagcaggaccacgcggtgatcgcggccgcgcacagcctgcaggacctccaccacctgaacctgggcgcggccggcgcgcacgactttttctcggcagggcagcaggccgccgccgctgcgatgcacggcctgggtagcatcgacagtgcgtcgctcgagcacagcaccggctccaactccgtcgtctacaacggcggggtcggcgacagcaacggcgccagcgccgtcggcggcagtggcggtggctacatgatgccgatgagcgctgccggagcaaccactacatcggcaatggtgagccacgagcaggtgcatgcacgggcctacgacgaagccaagcaggctgctcagatggggtacgagagctacctggtgaacgcggagaacaatggtggcggaaggatgtctgcatgggggactgtcgtgtctgcagccgcggcggcagcagcaagcagcaacgacaacatggccgccgacgtcgggcatggcggcgcgcagctcttcagtgtctggaacgacacttaagcgtacctagtggtacctgacatcttatagtctgcaacctctcgtgtctgaattcctatctttatcaagtgttattgcttccacgactataggacagctttcgtcgaaagcttttgctcatgtgatctcgaaggattcatctagtctgatttttcgtgacttgtatcggttttattggattcatccaacatatatcaataaaaaatgagttgtgtttcctttcttcctagttcagttaaaattatttccctcctgcgcttgtgctgtaattgtctgtgtacctgttgtttgtgactgtgttagttcccttggatatgatttcgtatttgatatgtacatggagatagcttagcttcattattggagtatgaagttagtatgacatagtcactctcctggaaaattgacactgcaaaccatatttttattctgaaccacaaatcctagtcagtccgctggcatatgccgtccgtttgctgaatccagaacgtgggtttggagatgtacggctgagatgcctctatgcgaaggggatttcgtggtgaaacgagatgggagtagagcaacgcccgtggaagatgcttcaaacttccacacttttgagcaacgatcggcagtagtaaggtagacgatttcaagatcaaagcatatgaagataaacaacatcaacaacaaaatttgttggggttctatagagagaaacagagctacatacatacactgttttgtatctaccatctgagatgatgaaaagatgaaaaactaaagaatgccccggcgccaacgccaggacacgccgcgcgcgcgtcacccgagccatctcttgacccagccggcgctgtatatttacacacgttgcagcatcgatcaccacctgttcgatcgcgtcgccgtcaccggcgcgccgcgacttattgaactagtctagggcgcggctaacaacctagcttagattgccttgtctaaacccttaggctaacgcgccactctagaaggccgatctcccccgaacgcgccagatccgatatcgatgggccctggccgaagcttggtcacccggtccgggcctagaaggccgatctcccgggcacccagctttcttgtacaaagtggccgttaacggatcggccagaatggcccggaccgggttaccccgcggatatgggtggagattatggtgcttgtcctcgattcaaaaacttgacaatttgttcgtaccaaaatgtcctctcagaaaaaataagtggtaattaatcattttgtcatgtaaatgcaacatttaatatttatgtggtcggacgaggaaaactaaaggcgatagattagagtttgaatacgtataattagtgatataccattgcatttttacttggttcgttagtagacagccagataactgaagtcactggacaataccttgttttgagcttcatttactcatcagtcatcacgcatgagtcatggtgcgagaagctagccataaccttgtttaatttatactattgccaactcaaaattaaatattaatgcatgataaaaattcgttgattgatagtgcactattattaagtattaactacgagtctttgacattagagttgagtttctcaaacttcataaatcaagagtgttacacttgcacatttttctttttcttatgaattcgagctcggtaccctggttcacaaactcaatacaacacacagtggagtagggtattacgctccggcggcccgaaccactctaaatccttgtgtcctcgtgtgctcttccaccattaatgactgtaattgcagggacacgaagagttgtagcgcttttgccaacaagatccgctatatgctagtagagtggaacctgcacagcaacaagcatccaataatctgagaataagaattatgtgtggtgatggttctcatctctgcaactcgccattttcgcgagagaaccaaatccaagttggtgaagatcatgatttgggctcatgggctggcatagtagctattacctttgcaattgtggttcgaatctatccgatattctccttttcagggagagctaatgcttatgcttattgggtattttggtttgacactgcttcacgcccaaaaaaaggcaactatgtctgagttggatatggcccaaaaaaaggcagctatgtctgagttggatatggaagtcttctttcgtttagggtgaagtaagaccaagctcatgagcttattatcttaggtcggaacaaattagttgataggcatggcacatttatcaaattataatgattttaacagaaaagcaacacctctttttcagcagcaccagctttgcaagctgcaattgacactccaagcatagtatttgctccaaactcagcctgcatttcgcacaatatcatatctatttccatttggataaaatatattttccagaaatatgggaacagaatcaagatacagaaaaaagttgtggtagtagtggtaagtggaaacacaagtacagtgaaaagatagcattatttctgaacagtcaaattaaccgaaataagtagtatcacatactgcccctaaattgactacacccaatgtaaagaattgcttgagcatattgagccatcagttgtttgtttgtgtaacggatttgacaatgcagagttcaggagcaaaaaaccgcaaaggagagaaagagggaaaggatctcctagtatcccaccttgtggcgcgccctgtcaagtgcatgatggcctggtcgatctgcgtctgctgctgcggttccatcccaacgagtgcctccgacaccttgtcgttgatcacccgcaccgcgtaggcgacccccctggcgaggaacttccgcctctcggaggccccggccgcgtcggcggcggcgccctcgagcgcgcccacgctagccgtagatgctcggtgcacggccttgttggtgtgcaactcgacctcaacggccggtgcgctacgcccgtcaaggatctggcgcgcccgcaccctcgtgatcacggtgggcgcctcccgcctcatgtggccgacgatgaaaagcgccgggttaggggccttggcgcgcaccgccgtattcagggcctcctcgctcttgcgcgagagcaggtgcttccccaggtactcctgcactgacaaggctgccacagcggtggaatttgtcctcacgacttcgccacgtcgtcctcacctccctggcttcccacgactccgccgtatcgaggtgctcggtgggtcgtcttaatccgaagtccgaactaggaagacgagacagagaggtctgaggaatgggcctcgtttgatgttgagctgaattatttttccagcataagcccaggtcttggtccatgaacaaaattactagaaacccagcccagtactacgatctaaaagagggactgccactggatagctctctctagcattctccacgctccaatacagcggcgtcgtgtctatccgggtctatccgcgaacacgtgagaactctccagaaactgctttctcctccacttcatctctctcgctttccctctataaaaagaccccttctaggaattgagggagacagcaagcaccaagcagcgatccgaagctcaatcaattcactcaaacctcttccccaaatcttcgattagatcttcgttgacaagaagactagaaccgaacctgacatgtccaacctgctcacggttcaccagaaccttccggctcttccagtggacgcgacgtccgatgaagtcaggaagaacctcatggacatgttccgcgacaggcaagcgttcagcgagcacacctggaagatgctgctctccgtctgccgctcctgggctgcatggtgcaagctgaacaacaggaagtggttccccgctgagcccgaggacgtgagggattaccttctgtacctgcaagcgcgaggtttgtttctgcttctacctttgatatatatataataattatcattaattagtagtaatataatatttcaaatatttttttcaaaataaaagaatgtagtatatagcaattgcttttctgtagtttataagtgtgtatattttaatttataacttttctaatatatgaccaaaacatggtgatgcctaggtctggcagtgaagaccatccagcaacaccttggacaactgaacatgcttcacaggcgctccggcctcccgcgccccagcgactcgaacgccgtgagcctcgtcatgcgccgcatcaggaaggaaaacgtcgatgccggcgaaagggcaaagcaggccctcgcgttcgagaggaccgatttcgaccaggtccgcagcctgatggagaacagcgacaggtgccaggacattaggaacctggcgttcctcggaattgcatacaacacgctcctcaggatcgcggaaattgcccgcattcgcgtgaaggacattagccgcaccgacggcggcaggatgcttatccacattggcaggaccaagacgctcgtttccaccgcaggcgtcgaaaaggccctcagcctcggagtgaccaagctcgtcgaacgctggatctccgtgtccggcgtcgcggacgacccaaacaactacctcttctgccgcgtccgcaagaacggggtggctgcccctagcgccaccagccaactcagcacgagggccttggaaggtattttcgaggccacccaccgcctgatctacggcgcgaaggatgacagcggtcaacgctacctcgcatggtccgggcactccgcccgcgttggagctgctagggacatggcccgcgccggtgtttccatccccgaaatcatgcaggcgggtggatggacgaacgtgaacattgtcatgaactacattcgcaaccttgacagcgagacgggcgcaatggttcgcctcctggaagatggtgactgaggtacccaacctagacttgtccatcttctggattggccaacttaattaatgtatgaaataaaaggatgcacacatagtgacatgctaatcactataatgtgggcatcaaagttgtgtgttatgtgtaattactagttatctgaataaaagagaaagagatcatccatatttcttatcctaaatgaatgtcacgtgtctttataattctttgatgaaccagatgcatttcattaaccaaatccatatacatataaatattaatcatatataattaatatcaattgggttagcaaaacaaatctagtctaggtgtgttttgcgatccgataatcgatgggtctaaaaacggcccctaactaacgcttagttgcccgctagattagtcccccgttagtgcctagttagacacacgacgaactaggggctagcacgcgttagataacttcgtatagcatacattatacgaagttattccggaccgggttaccgaattcaattcctgcccttaaggccaattgttcaagattcattcaacaattgaaacatctcccatgattaaatcagtataaggttgctatggtcttgcttgacaaagtttttttttgagggaatttcaactaaatttttgagtgaaactatcaaatactgattttaaaaaatttttataaaaggaagcgcagagataaaaggccatctatgctacaaaagtacccaaaaatgtaatcctaaagtatgaattgcattttttttttgtttggacgaaaggaaaggagtattaccacaagaatgatatcatcttcatatttagatcttttttgggtaaagcttgagattctctaaatatagagaaatcagaagaaaaaaaaaccgtgttttggtggttttgatttctagcctccacaataactttgacggcgtcgacaagtctaacggacaccaagcagcgaaccaccagcgccgagccaagcgaagcagacggccgagacgttgacaccttcggcgcggcatctctcgagagttccgctccggcgctccacctccaccgctggcggtttcttattccgttccgttccgcctcctgctctgctcctctccacaccacacggcacgaaaccgttacggcaccggcagcacccagcacgggagaggggattcctttcccaccgttccttccctttccgccccgccgctataaatagccagccccatccccagcttttttccccaatctcatctcctctctcctgttgttcggagcacacgcacaatccgatcgatccccaaatccccttcgtctctcctcgcgagcctcgtggatcccagcttcaaggtacggcgatcgatcatcccccctccttctctctaccttcttttctctagactacatcggatggcgatccatggttagggcctgctagtttcccttcctgttttgtcgatggctgcgaggcacaatagatctgatggcgttatgacggctaacttgtcatgttgttgcgatttatagtccctttaggagatcagtttaatttctcggatggttcgagatcggtggtccatggttagtaccctaagatccgcgctgttagggttcgtagatggaggcgacctgttctgattgttaacttgtcagtacctgggaaatcctgggatggttctagctcgtccgcagatgagatcgatttcatgatcctctgtatcttgtttcgttgcctaggttccgtctaatctatccgtggtatgatgtagatgttttgatcgtgctaactacgtcttgtaaagttaattgtcaggtcataatttttagcatgcctttttttttgtttggttttgtctaattgggctgtcgttctagatcagagtagaagactgttccaaactacctgctggatttattgaacttggatctgtatgtgtgtcacatatcttcataaattcatgattaagatggattgaaatatcttttatctttttggtatggatagttctatatgttggtgtggctttgttagatgtatacatgcttagatacatgaagcaacgtgctgctactgtttagtaattgctgttcatttgtctaataaacagataaggatatgtatttatgttgctgttggttttgctggtactttgttggatacaaatgcttcaatacagaaaacagcatgctgctacgatttaccatttatctaatcttatcatatgtctaatctaataaacaaacatgcttttaaattatcttcatatgcttggatgatggcatacacagcggctatgtgtggttttttaaatacccagcatcatgggcatgcatgacactgctttaatatgctttttatttgcttgagactgtttcttttgtttatactgaccctttagttcggtgactcttctgcaggtcgactttaacttagcctaggatccatggcccagtccaagcacggcctgaccaaggagatgaccatgaagtaccgcatggagggctgcgtggacggccacaagttcgtgatcaccggcgagggcatcggctaccccttcaagggcaagcaggccatcaacctgtgcgtggtggagggcggccccttgcccttcgccgaggacatcttgtccgccgccttcatgtacggcaaccgcgtgttcaccgagtacccccaggacatcgtcgactacttcaagaactcctgccccgccggctacacctgggaccgctccttcctgttcgaggacggcgccgtgtgcatctgcaacgccgacatcaccgtgagcgtggaggagaactgcatgtaccacgagtccaagttctacggcgtgaacttccccgccgacggccccgtgatgaagaagatgaccgacaactgggagccctcctgcgagaagatcatccccgtgcccaagcagggcatcttgaagggcgacgtgagcatgtacctgctgctgaaggacggtggccgcttgcgctgccagttcgacaccgtgtacaaggccaagtccgtgccccgcaagatgcccgactggcacttcatccagcacaagctgacccgcgaggaccgcagcgacgccaagaaccagaagtggcacctgaccgagcacgccatcgcctccggctccgccttgccctccggactcagatctcgatagggtaccaatggccagttaacagatccagctgctgctgttctagggttcacaagtctgcctatttgtcttccccaatggagctatggttgtctggtctggtccttggtcgtgtcccgtttcattgtgtactatttacctgtaatgtgtatccttaagtctggtttgatggtgtctgaaacgttttgctgtggtagagcagcatggaagaactataatgaataagtgatccctaatcattgtgtccaaattttgcttctgctatacccttttgtgctgtttcttatgttttgcttaaaaatttgatctgacaaacaaatttgtctaaattatgctcttgttctgactgtgtactgtacacatttgtattgctaccggtttggcacatagttttctctttgattgcagatcaaacccttctgattgcagattgcttggctatggctgatgtgctcactgttcttctttagcttgtatattgctgatggtggcttggctacggctgaaaaagttgctgctgcgccgacttggcaactgttgctccagtaatgctttgtcctctcttcctagccgccgacttggcacttggcagctgttgctcctgtaatgcgttgttatctcttatctcttgagatgtactatgattttgaggctgtttgacttgtgccagattgccagtgctgatgctatattatctcaggtttttatgctagtatatgttttactgtgtgctgcctgtgtcgagttacgtaatctattgaaccgctatgcgtgttgatgccctgttgttgcttgccagattgatgcccctgttgcttgcagcttgcaagctgtagtgaaatcctaaaattcgaaaccaaatctattctgaacttttgaagatctgtgatgtccggaagaaaagattcaaacagataaacgggactctccagaatctataaaataaatgatcgacaaacgctttgctttggtaggcttcctagttagttagcggaccgaagcttcggtccgggcctagaaggccagcttcggccgcccctcggtaccctgggatctgcccttactttaacgcctctaaccaacacccctttatctttataaggaacaataaacagaatttgccccactgttctaaatcacctaataatatccccagctaaaaacaataaaggtttcctagaattaagacaagcatgactgttcctccaggagggtttggaacattgttgcagtcttgcagatacgggcgaagggtgagaaacagagcggagggctggaggtgacctcggtagtcgacgccggagttgagcttgacaacgacggggcggcccctgatggacttgaggaagtccgatggcgtcttcaccgtcccgccggcgcccgaggcgggcctgtcgctgccgccgccgccgctgctcatcttgcgcgctgtgcccccggcggtgtccctgtgttgcggatcgcgggtgggccaggtggatgcgagggcgacccgtttggactccggccggagccgccggatccctggtcggtgtcagtgccgtttactctgggccccacgtgtcagtaccgtctgtagatgacaacaacccgtcgtccacagtcatgtccaaaatatcctttcttcttttttttcgattcggatatctatcttccttttttttttccaaaaatcttcttgacgcaccagcgcgcacgtttgtggtaaacgccgacacgtcggtcccacgtcgatagaccccacccaccagtgagtagcgtgtacgtattcgggggtgacggacgtgtcgccgtcgtcttgctagtcccattcccatctgagccacacatctctgaacaaaaaaaaggagggaggcctccacgcacatccccctccgtgccacccgccccaaaccctcgcgccgcctccgagacagccgccgcaaccatggccaccgccgccgccgcgtctaccgcgctcactggcgccactaccgctgcgcccaaggcgaggcgccgggcgcacctcctggccacccgccgcgccctcgccgcgcccatcaggtgctcagcggcgtcacccgccatgccgatggctcccccggccaccccgctccggccgtggggccccaccgagccccgcaagggtgctgacatcctcgtcgagtccctcgagcgctgcggcgtccgcgacgtcttcgcctaccccggcggcgcgtccatggagatccaccaggcactcacccgctcccccgtcatcgccaaccacctcttccgccacgagcaaggggaggcctttgccgcctccggctacgcgcgctcctcgggccgcgtcggcgtctgcatcgccacctccggccccggcgccaccaacctagtctccgcgctcgccgacgcgctgctcgattccgtccccatggtcgccatcacgggacaggtggcgcgacgcatgattggcaccgacgccttccaggagacgcccatcgtcgaggtcacccgctccatcaccaagcacaactacctggtcctcgacgtcgacgacatcccccgcgtcgtgcaggaggctttcttcctcgcctcctctggtcgaccagggccggtgcttgtcgacatccccaaggacatccagcagcagatggcggtgcctgtctgggacaagcccatgagtctgcctgggtacattgcgcgccttcccaagccccctgcgactgagttgcttgagcaggtgctgcgtcttgttggtgaatcgcggcgccctgttctttatgtgggcggtggctgcgcagcatctggtgaggagttgcgacgctttgtggagctgactggaatcccggtcacaactactcttatgggcctcggcaacttccccagcgacgacccactgtctctgcgcatgctaggtatgcatgggacggtgtatgcaaattatgcagtggataaggccgatctgttgcttgcacttggtgtgcggtttgatgatcgcgtgacagggaagattgaggcttttgcaagcagggctaagattgtgcacgttgatattgatccggctgagattggcaagaacaagcagccacatgtgtccatctgtgcagatgttaagcttgctttgcagggcatgaatgctcttcttgaaggaagcacatcaaagaagagctttgactttggctcatggaacgatgagttggatcagcagaagagggaattcccccttgggtataaaacatctaatgaggagatccagccacaatatgctattcaggttcttgatgagctgacgaaaggcgaggccatcatcggcacaggtgttgggcagcaccagatgtgggcggcacagtactacacttacaagcggccaaggcagtggttgtcttcagctggtcttggggctatgggatttggtttgccggctgctgctggtgcttctgtggcaaacccaggtgtcactgttgttgacatcgatggagatggtagctttctcatgaacgttcaggagctagctatgatccgaattgagaacctcccagtgaaggtctttgtgctaaacaaccagcacctggggatggtggtgcagttggaggacaggttctataaggccaacagagcgcacacatacttgggaaacccagagaatgaaagtgagatatatccagatttcgtgacgatcgccaaagggttcaacattccagccgtccgtgtgacaaagaagaacgaagtccgcgcagcgataaagaagatgctcgagactccagggccgtacctcttggatataatcgtcccacaccaggagcatgtgttgcctatgatccctagtggtggggctttcaaggatatgatcctggatggtgatggcaggactgtgtactgacttcgaataggtacccggggatcctctagtgccgtgggtcgtttaagctgccgctgtacctgtgtcgtctggtgccttctggtgtacctgggaggttgtcgtctatcaagtatctgtggttggtgtcatgagtcagtgagtcccaatactgttcgtgtcctgtgtgcattatacccaaaactgttatgggcaaatcatgaataagcttgatgttcgaacttaaaagtctctgctcaatatggtattatggttgtttttgttcgtctcctaatatttgcctgggatcaaattttattggctggtgttcatttgacctccatgttcttgctaggctccattttttactctacagccataatatgtttgattgtttggtttgttctttgttgtacacctggttctgtcgagcttagttttcgacactggcttacagcttaacatgttgctattttattgggttctgattgctattttattgggttctgattgctagtttttgctgaatccaaaaaccatgttatttatttaagcgatccaggttattattatgatggtggctaagtttttttttttccaagggtaaattttctggattctccagtgtttctgtggccgaattcaatcactagagtcgacctgcaaagcttcggtccgggcctagaaggcccgcgccacttacgcttgattccgatgacttcgtaggttcctagctcaagccgctcgtgtccaagcgtcacttacgattagctaatgattacggcatctaggaccgactagttcttatgtgcttctagtctccaaatgtggttgatagttattttgctctaagatcaacagtaatgaagtataaatcatcgttgtggtgtgctactcggttaattgagcattaacacacacaaacatgacgaggatggtataatctccaaaaatgtgtactttgttaggtgggaccctatagccttgattaatgtgctatgttaggcatgcctggaaacgtgtgacgcatatgttttgtgaacctgttgatattatatgtgcttttatattaccatattttattaaaatactaatatttattactagtaagatataacattctatctagcttaaaaactaaccataaatattccataataactagatttaccaaactaatatactaaatatacataataaatacaaaattaacaagacaataatcaatatttatgagcttaatatatttagacattatggttggtcgacgataatcatgctaacttttcgtaattgcttgattgaaatatgcttagaataatgcctctttgttctacatggcaaatagggaccattatggtgtaacaccctgggaaccacaaacaccccgaaatgctactaaactacacaactaaccttcatatataaaatttcgacagcatctcctttgaaaatttgcatagacgtggaagcaacagagtataaacagatctgcgtttaaacgtgcaagcgctactagacaattcagtacattaaaaacgtccgcaatgtgttattaagttgtctaagcgtcaatttgtttacaccacaatatatcctgcca

SEQ ID NO: 158 - DNA, 21414 bp, unidentified
  source 1..21414: mol_type = other DNA; note = Artificial
gtttacccgccaatatatcctgtcaaacactgcggccgcacttgaccgcggatggagccggagctgtggtgaggccatcgacgggaggtgggggagaacacagtctcagtgttctttgtgagtccgcaaggtttttagcttttctgtattaattaaggttgctgttggctgtagaatacggtcgtggaagagctgtatcggtagctactacgtaagctattatatactggaagtctggagctcgtcgatctccggtcgtcttcctccatttctcctcgtcttgctttgactgctgctaccatttgcttctgttttctgatgaagcatgccatgtcggccaccagtgtttgtgtggtttttgcagggaatggctttcaagtgctgtgattgaatggccctcgtcgtcctcggctgagctcacatggacgcgtcatgtgagtgagatatatgatcatatgatgagtggggttcgggtgagtgcgtacttgaagtaggatcccgctttcactcattcattcattggcctttaaaccgggaaattttcgcgaggagatggagggaagcaagcagggtgacgagtgcagagtgccgcgagcgctttgtcaaaaggcaccgccgtaggcaaaaaaatcaatggccctgactgactcgatggtagtactactgtagagactagagagggttgctccccatatcttcgtgtgacttttactccagcattgcatttccgtcattgagacgttaattaatagcagctttcgggacagatgactgtggccatgtttcgtcacggccgcttcgtgccagctgggggtactatagtactgtgattttgttagtaaaaactttcattaggccaccattgacgaccgggccttcgcttttgctgcgctaattaaccatttcccggcgaccgaagggaacatgaacatgccccgacacatgagggcatgaggactagtgttctccctgtcgttcgttgacttgactagtgatagtttaaacgctcttcaactggaagagcggttactaccggttcactagctagctgctaatcgagctagttaccctatgaggtgacatgaagcgctcacggttactatgacggttagcttcacgactgttggtggcagtagcgtacgacttagctatagttccggacttacctagctaataacttcgtatagcatacattatacgaagttatggttaccgccctggccgaagctttccggacttacccttaagcgatttaaatcctgaggcctgcaacactgatagtttaaactgaaggcgggaaacgacaatctgatcatgagcggagaattaagggagtcacgttatgacccccgccgatgacgcgggacaagccgttttacgtttggaactgacagaaccgcaacgattgaaggagccactcagccgcgggtttctggagtttaatgagctaagcacatacgtcagaaaccattattgcgcgttcaaaagtcgcctaaggtcactatcagctagcaaatatttcttgtcaaaaatgctccactgacgttccataaattcccctcggtatccaattagagtctcatattcactcccatggcggccaatgcgggcggcggtggagcgggaggaggcagcggcagcggcagcgtggctgcgccggcggtgtgccgccccagcggctcgcggtggacgccgacgccggagcagatcaggatgctgaaggagctctactacggctgcggcatccggtcgcccagctcggagcagatccagcgcatcaccgccatgctgcggcagcacggcaagatcgagggcaagaacgtcttctactggttccagaaccacaaggcccgcgagcgccagaagcgccgcctcaccagcctcgacgtcaacgtgcccgccgccggcgcggccgacgccaccaccagccaactcggcgtcctctcgctgtcgtcgccgccgccttcaggcgcggcgcctccctcgcccaccctcggcttctacgccgccggcaatggcggcggatcggctgtgctgctggacacgagttccgactggggcagcagcggcgctgctatggccaccgagacatgcttcctgcaggactacatgggcgtgacggacacgggcagctcgtcgcagtggccacgcttctcgtcgtcggacacgataatggcggcggccgcggcgcgggcggcgacgacgcgggcgcccgagacgctccctctcttcccgacctgcggcgacgacggcggcagcggtagcagcagctacttgccgttctggggtgccgcgtccacaactgccggcgccacttcttccgttgcgatccaacagcaacaccagctgcaggagcagtacagcttttacagcaacagcaacagcacccagctggccggcaccggcaaccaagacgtatcggcaacagcagcagcagccgccgccctggagctgagcctcagctcatggtgctccccttaccctgctgcagggagtatgtgagagcaacgcgagctgccactgctcttcactgatgtctctggaatggaaggaggaggaagtgagaacagatcattcgacaaagcagcattagtccgttgatcggtggaagaccactcgtcagtgttgagttgaatgtttgatcaataaaatacggcaatgctgtaagggttgttttttatgccattgataatacactgtactgttcagttgttgaactctatttcttagccatgccaagtgcttttcttattttgaataacattacagcaaaaagttgaaagacaaaaaaaaaaacccccgaacagagtgctttgggtcccaagcttctttagactgtgttcggcgttccccctaaatttctccccctatatctcactcacttgtcacatcagcgttctctttccccctatatctccacgctctacagcagttccacctatatcaaacctctataccccaccacaacaatattatatactttcatcttcaactaactcatgtaccttccaatttttttctactaataattatttacgtgcacagaaacttagcaaggagagagagagcgggaatttaaatgctcggcgttaggcttttagtccgctaggtggctagaccgaggttaggacgctagttcactaggggcctagtggtgttttaagacgtcacggtcaccgcggccgcatcgagcagctggcttgtggggaccagacaaaaaaggaatggtgcagaattgttaggcgcacctaccaaaagcatctttgcctttattgcaaagataaagcagattcctctagtacaagtggggaacaaaataacgtggaaaagagctgtcctgacagcccactcactaatgcgtatgacgaacgcagtgacgaccacaaaactcgagcaacgagatcatgagccaatcaaagaggagtgatgtagacctaaagcaataatggagccatgacgtaagggcttacgcccatacgaaataattaaaggctgatgtgacctgtcggtctctcagaacctttactttttatgtttggcgtgtatttttaaatttccacggcaatgacgatgtgaccgtcgacccactaaaacattgctttgtcaaaagctaaaaaagatgatgcccgacagccacttgtgtgaagcatgagaagccggtccctccactaagaaaattagtgaagcatcttccagtggtccctccactcacagctcaatcagtgagcaacaggacgaaggaaatgacgtaagccatgacgtctaatcccattcgaaacgcgtggaccgaagcttgcatgcctgcagtgcagcgtgacccggtcgtgcccctctctagagataatgagcattgcatgtctaagttataaaaaattaccacatattttttttgtcacacttgtttgaagtgcagtttatctatctttatacatatatttaaactttactctacgaataatataatctatagtactacaataatatcagtgttttagagaatcatataaatgaacagttagacatggtctaaaggacaattgagtattttgacaacaggactctacagttttatctttttagtgtgcatgtgttctcctttttttttgcaaatagcttcacctatataatacttcatccattttattagtacatccatttagggtttagggttaatggtttttatagactaatttttttagtacatctattttattctattttagcctctaaattaagaaaactaaaactctattttagtttttttatttaataatttagatataaaatagaataaaataaagtgactaaaaattaaacaaataccctttaagaaattaaaaaaactaaggaaacatttttcttgtttcgagtagataatgccagcctgttaaacgccgtcgacgagtctaacggacaccaaccagcgaaccagcagcgtcgcgtcgggccaagcgaagcagacggcacggcatctctgtcgctgcctctggacccctctcgagagttccgctccaccgttggacttgctccgctgtcggcatccagaaattgcgtggcggagcggcagacgtgagccggcacggcaggcggcctcctcctcctctcacggcaccggcagctacgggggattcctttcccaccgctccttcgctttcccttcctcgcccgccgtaataaatagacaccccctccacaccctctttccccaacctcgtgttgttcggagcgcacacacacacaaccagatctcccccaaatccacccgtcggcacctccgcttcaaggtacgccgctcgtcctcccccccccccctctctaccttctctagatcggcgttccggtccatgcatggttagggcccggtagttctacttctgttcatgtttgtgttagatccgtgtttgtgttagatccgtgctgctagcgttcgtacacggatgcgacctgtacgtcagacacgttctgattgctaacttgccagtgtttctctttggggaatcctgggatggctctagccgttccgcagacgggatcgatttcatgattttttttgtttcgttgcatagggtttggtttgcccttttcctttatttcaatatatgccgtgcacttgtttgtcgggtcatcttttcatgcttttttttgtcttggttgtgatgatgtggtctggttgggcggtcgttctagatcggagtagaattctgtttcaaactacctggtggatttattaattttggatctgtatgtgtgtgccatacatattcatagttacgaattgaagatgatggatggaaatatcgatctaggataggtatacatgttgatgcgggttttactgatgcatatacagagatgctttttgttcgcttggttgtgatgatgtggtgtggttgggcggtcgttcattcgttctagatcggagtagaatactgtttcaaactacctggtgtatttattaattttggaactgtatgtgtgtgtcatacatcttcatagttacgagtttaagatggatggaaatatcgatctaggataggtatacatgttgatgtgggttttactgatgcatatacatgatggcatatgcagcatctattcatatgctctaaccttgagtacctatctattataataaacaagtatgttttataattattttgatcttgatatacttggatgatggcatatgcagcagctatatgtggatttttttagccctgccttcatacgctatttatttgcttggtactgtttcttttgtcgatgctcaccctgttgtttggtgttacttctgcaggtcgactttaacttagcctaggatccatggccactgtgaacaactggctcgctttctccctctccccgcaggagctgccgccctcccagacgacggactccacactcatctcggccgccaccgccgaccatgtctccggcgatgtctgcttcaacatcccccaagattggagcatgaggggatcagagctttcggcgctcgtcgcggagccgaagctggaggacttcctcggcggcatctccttctccgagcagcatcacaaggccaactgcaacatgatacccagcactagcagcacagtttgctacgcgagctcaggtgctagcaccggctaccatcaccagctgtaccaccagcccaccagctcagcgctccacttcgcggactccgtaatggtggcttcctcggccggtgtccacgacggcggtgccatgctcagcgcggccgccgctaacggtgtcgctggcgctgccagtgccaacggcggcggcatcgggctgtccatgattaagaactggctgcggagccaaccggcgcccatgcagccgagggtggcggcggctgagggcgcgcaggggctctctttgtccatgaacatggcggggacgacccaaggcgctgctggcatgccacttctcgctggagagcgcgcacgggcgcccgagagtgtatcgacgtcagcacagggtggagccgtcgtcgtcacggcgccgaaggaggatagcggtggcagcggtgttgccggcgctctagtagccgtgagcacggacacgggtggcagcggcggcgcgtcggctgacaacacggcaaggaagacggtggacacgttcgggcagcgcacgtcgatttaccgtggcgtgacaaggcatagatggactgggagatatgaggcacatctttgggataacagttgcagaagggaagggcaaactcgtaagggtcgtcaagtctatttaggtggctatgataaagaggagaaagctgctagggcttatgatcttgctgctctgaagtactggggtgccacaacaacaacaaattttccagtgagtaactacgaaaaggagctcgaggacatgaagcacatgacaaggcaggagtttgtagcgtctctgagaaggaagagcagtggtttctccagaggtgcatccatttacaggggagtgactaggcatcaccaacatggaagatggcaagcacggattggacgagttgcagggaacaaggatctttacttgggcaccttcagcacccaggaggaggcagcggaggcgtacgacatcgcggcgatcaagttccgcggcctcaacgccgtcaccaacttcgacatgagccgctacgacgtgaagagcatcctggacagcagcgccctccccatcggcagcgccgccaagcgcctcaaggaggccgaggccgcagcgtccgcgcagcaccaccacgccggcgtggtgagctacgacgtcggccgcatcgcctcgcagctcggcgacggcggagccctggcggcggcgtacggcgcgcactaccacggcgccgcctggccgaccatcgcgttccagccgggcgccgccagcacaggcctgtaccacccgtacgcgcagcagccaatgcgcggcggcgggtggtgcaagcaggagcaggaccacgcggtgatcgcggccgcgcacagcctgcaggacctccaccacctgaacctgggcgcggccggcgcgcacgactttttctcggcagggcagcaggccgccgccgctgcgatgcacggcctgggtagcatcgacagtgcgtcgctcgagcacagcaccggctccaactccgtcgtctacaacggcggggtcggcgacagcaacggcgccagcgccgtcggcggcagtggcggtggctacatgatgccgatgagcgctgccggagcaaccactacatcggcaatggtgagccacgagcaggtgcatgcacgggcctacgacgaagccaagcaggctgctcagatggggtacgagagctacctggtgaacgcggagaacaatggtggcggaaggatgtctgcatgggggactgtcgtgtctgcagccgcggcggcagcagcaagcagcaacgacaacatggccgccgacgtcgggcatggcggcgcgcagctcttcagtgtctggaacgacacttaagcgtacctagtggtacctgacatcttatagtctgcaacctctcgtgtctgaattcctatctttatcaagtgttattgcttccacgactataggacagctttcgtcgaaagcttttgctcatgtgatctcgaaggattcatctagtctgatttttcgtgacttgtatcggttttattggattcatccaacatatatcaataaaaaatgagttgtgtttcctttcttcctagttcagttaaaattatttccctcctgcgcttgtgctgtaattgtctgtgtacctgttgtttgtgactgtgttagttcccttggatatgatttcgtatttgatatgtacatggagatagcttagcttcattattggagtatgaagttagtatgacatagtcactctcctggaaaattgacactgcaaaccatatttttattctgaaccacaaatcctagtcagtccgctggcatatgccgtccgtttgctgaatccagaacgtgggtttggagatgtacggctgagatgcctctatgcgaaggggatttcgtggtgaaacgagatgggagtagagcaacgcccgtggaagatgcttcaaacttccacacttttgagcaacgatcggcagtagtaaggtagacgatttcaagatcaaagcatatgaagataaacaacatcaacaacaaaatttgttggggttctatagagagaaacagagctacatacatacactgttttgtatctaccatctgagatgatgaaaagatgaaaaactaaagaatgccccggcgccaacgccaggacacgccgcgcgcgcgtcacccgagccatctcttgacccagccggcgctgtatatttacacacgttgcagcatcgatcaccacctgttcgatcgcgtcgccgtcaccggcgcgccgcgacttattgaactagtctagggcgcggctaacaacctagcttagattgccttgtctaaacccttaggctaacgcgccactctagaaggccgatctcccccgaacgcgccagatccgatatcgatgggccctggccgaagcttggtcacccggtccgggcctagaaggccgatctcccgggcacccagctttcttgtacaaagtggccgttaacggatcggccagaatggcccggaccgggttaccccgcggtagttatgtataaaagtcccgattgctgcgaatgatgagtatgcttttcgtttcttatattatctctacacattatccgaagagtgttccccttagctaccgttggaatcacatgaaataaaaggctatttaaaaattatactgcttgagttaaatttcattttgtttttgtaatacatcactaaaaaaatacttcaattagaaaatttggaaaatatcctactatattatttgggaagtacattttaaatgtaaccttaatttttgtaagtaattacataggtttgccattagaaataaaattttaaagagtaaattaatttatctctttaaggattaaaaagtcaaatactaatttaattaattaaatttaattaaaaaacgaaatacattattaatttccaaaaataataatcaataaaaatcaacatataagatttgatatctaaattttaattaatttaatttaattagaaaaacgaaatacattattaatttccgaattcgagctcggtaccctggttcacaaactcaatacaacacacagtggagtagggtattacgctccggcggcccgaaccactctaaatccttgtgtcctcgtgtgctcttccaccattaatgactgtaattgcagggacacgaagagttgtagcgcttttgccaacaagatccgctatatgctagtagagtggaacctgcacagcaacaagcatccaataatctgagaataagaattatgtgtggtgatggttctcatctctgcaactcgccattttcgcgagagaaccaaatccaagttggtgaagatcatgatttgggctcatgggctggcatagtagctattacctttgcaattgtggttcgaatctatccgatattctccttttcagggagagctaatgcttatgcttattgggtattttggtttgacactgcttcacgcccaaaaaaaggcaactatgtctgagttggatatggcccaaaaaaaggcagctatgtctgagttggatatggaagtcttctttcgtttagggtgaagtaagaccaagctcatgagcttattatcttaggtcggaacaaattagttgataggcatggcacatttatcaaattataatgattttaacagaaaagcaacacctctttttcagcagcaccagctttgcaagctgcaattgacactccaagcatagtatttgctccaaactcagcctgcatttcgcacaatatcatatctatttccatttggataaaatatattttccagaaatatgggaacagaatcaagatacagaaaaaagttgtggtagtagtggtaagtggaaacacaagtacagtgaaaagatagcattatttctgaacagtcaaattaaccgaaataagtagtatcacatactgcccctaaattgactacacccaatgtaaagaattgcttgagcatattgagccatcagttgtttgtttgtgtaacggatttgacaatgcagagttcaggagcaaaaaaccgcaaaggagagaaagagggaaaggatctcctagtatcccaccttgtggcgcgccctgtcaagtgcatgatggcctggtcgatctgcgtctgctgctgcggttccatcccaacgagtgcctccgacaccttgtcgttgatcacccgcaccgcgtaggcgacccccctggcgaggaacttccgcctctcggaggccccggccgcgtcggcggcggcgccctcgagcgcgcccacgctagccgtagatgctcggtgcacggccttgttggtgtgcaactcgacctcaacggccggtgcgctacgcccgtcaaggatctggcgcgcccgcaccctcgtgatcacggtgggcgcctcccgcctcatgtggccgacgatgaaaagcgccgggttaggggccttggcgcgcaccgccgtattcagggcctcctcgctcttgcgcgagagcaggtgcttccccaggtactcctgcactgacaaggctgccacagcggtggaatttgtcctcacgacttcgccacgtcgtcctcacctccctggcttcccacgactccgccgtatcgaggtgctcggtgggtcgtcttaatccgaagtccgaactaggaagacgagacagagaggtctgaggaatgggcctcgtttgatgttgagctgaattatttttccagcataagcccaggtcttggtccatgaacaaaattactagaaacccagcccagtactacgatctaaaagagggactgccactggatagctctctctagcattctccacgctccaatacagcggcgtcgtgtctatccgggtctatccgcgaacacgtgagaactctccagaaactgctttctcctccacttcatctctctcgctttccctctataaaaagaccccttctaggaattgagggagacagcaagcaccaagcagcgatccgaagctcaatcaattcactcaaacctcttccccaaatcttcgattagatcttcgttgacaagaagactagaaccgaacctgacatgtccaacctgctcacggttcaccagaaccttccggctcttccagtggacgcgacgtccgatgaagtcaggaagaacctcatggacatgttccgcgacaggcaagcgttcagcgagcacacctggaagatgctgctctccgtctgccgctcctgggctgcatggtgcaagctgaacaacaggaagtggttccccgctgagcccgaggacgtgagggattaccttctgtacctgcaagcgcgaggtttgtttctgcttctacctttgatatatatataataattatcattaattagtagtaatataatatttcaaatatttttttcaaaataaaagaatgtagtatatagcaattgcttttctgtagtttataagtgtgtatattttaatttataacttttctaatatatgaccaaaacatggtgatgcctaggtctggcagtgaagaccatccagcaacaccttggacaactgaacatgcttcacaggcgctccggcctcccgcgccccagcgactcgaacgccgtgagcctcgtcatgcgccgcatcaggaaggaaaacgtcgatgccggcgaaagggcaaagcaggccctcgcgttcgagaggaccgatttcgaccaggtccgcagcctgatggagaacagcgacaggtgccaggacattaggaacctggcgttcctcggaattgcatacaacacgctcctcaggatcgcggaaattgcccgcattcgcgtgaaggacattagccgcaccgacggcggcaggatgcttatccacattggcaggaccaagacgctcgtttccaccgcaggcgtcgaaaaggccctcagcctcggagtgaccaagctcgtcgaacgctggatctccgtgtccggcgtcgcggacgacccaaacaactacctcttctgccgcgtccgcaagaacggggtggctgcccctagcgccaccagccaactcagcacgagggccttggaaggtattttcgaggccacccaccgcctgatctacggcgcgaaggatgacagcggtcaacgctacctcgcatggtccgggcactccgcccgcgttggagctgctagggacatggcccgcgccggtgtttccatccccgaaatcatgcaggcgggtggatggacgaacgtgaacattgtcatgaactacattcgcaaccttgacagcgagacgggcgcaatggttcgcctcctggaagatggtgactgaggtacccaacctagacttgtccatcttctggattggccaacttaattaatgtatgaaataaaaggatgcacacatagtgacatgctaatcactataatgtgggcatcaaagttgtgtgttatgtgtaattactagttatctgaataaaagagaaagagatcatccatatttcttatcctaaatgaatgtcacgtgtctttataattctttgatgaaccagatgcatttcattaaccaaatccatatacatataaatattaatcatatataattaatatcaattgggttagcaaaacaaatctagtctaggtgtgttttgcgatccgataatcgatgggtctaaaaacggcccctaactaacgcttagttgcccgctagattagtcccccgttagtgcctagttagacacacgacgaactaggggctagcacgcgttagataacttcgtatagcatacattatacgaagttattccggaccgggttaccgaattcaattcctgcccttaaggccaattgttcaagattcattcaacaattgaaacatctcccatgattaaatcagtataaggttgctatggtcttgcttgacaaagtttttttttgagggaatttcaactaaatttttgagtgaaactatcaaatactgattttaaaaaatttttataaaaggaagcgcagagataaaaggccatctatgctacaaaagtacccaaaaatgtaatcctaaagtatgaattgcattttttttttgtttggacgaaaggaaaggagtattaccacaagaatgatatcatcttcatatttagatcttttttgggtaaagcttgagattctctaaatatagagaaatcagaagaaaaaaaaaccgtgttttggtggttttgatttctagcctccacaataactttgacggcgtcgacaagtctaacggacaccaagcagcgaaccaccagcgccgagccaagcgaagcagacggccgagacgttgacaccttcggcgcggcatctctcgagagttccgctccggcgctccacctccaccgctggcggtttcttattccgttccgttccgcctcctgctctgctcctctccacaccacacggcacgaaaccgttacggcaccggcagcacccagcacgggagaggggattcctttcccaccgttccttccctttccgccccgccgctataaatagccagccccatccccagcttttttccccaatctcatctcctctctcctgttgttcggagcacacgcacaatccgatcgatccccaaatccccttcgtctctcctcgcgagcctcgtggatcccagcttcaaggtacggcgatcgatcatcccccctccttctctctaccttcttttctctagactacatcggatggcgatccatggttagggcctgctagtttcccttcctgttttgtcgatggctgcgaggcacaatagatctgatggcgttatgacggctaacttgtcatgttgttgcgatttatagtccctttaggagatcagtttaatttctcggatggttcgagatcggtggtccatggttagtaccctaagatccgcgctgttagggttcgtagatggaggcgacctgttctgattgttaacttgtcagtacctgggaaatcctgggatggttctagctcgtccgcagatgagatcgatttcatgatcctctgtatcttgtttcgttgcctaggttccgtctaatctatccgtggtatgatgtagatgttttgatcgtgctaactacgtcttgtaaagttaattgtcaggtcataatttttagcatgcctttttttttgtttggttttgtctaattgggctgtcgttctagatcagagtagaagactgttccaaactacctgctggatttattgaacttggatctgtatgtgtgtcacatatcttcataaattcatgattaagatggattgaaatatcttttatctttttggtatggatagttctatatgttggtgtggctttgttagatgtatacatgcttagatacatgaagcaacgtgctgctactgtttagtaattgctgttcatttgtctaataaacagataaggatatgtatttatgttgctgttggttttgctggtactttgttggatacaaatgcttcaatacagaaaacagcatgctgctacgatttaccatttatctaatcttatcatatgtctaatctaataaacaaacatgcttttaaattatcttcatatgcttggatgatggcatacacagcggctatgtgtggttttttaaatacccagcatcatgggcatgcatgacactgctttaatatgctttttatttgcttgagactgtttcttttgtttatactgaccctttagttcggtgactcttctgcaggtcgactttaacttagcctaggatccatggcccagtccaagcacggcctgaccaaggagatgaccatgaagtaccgcatggagggctgcgtggacggccacaagttcgtgatcaccggcgagggcatcggctaccccttcaagggcaagcaggccatcaacctgtgcgtggtggagggcggccccttgcccttcgccgaggacatcttgtccgccgccttcatgtacggcaaccgcgtgttcaccgagtacccccaggacatcgtcgactacttcaagaactcctgccccgccggctacacctgggaccgctccttcctgttcgaggacggcgccgtgtgcatctgcaacgccgacatcaccgtgagcgtggaggagaactgcatgtaccacgagtccaagttctacggcgtgaacttccccgccgacggccccgtgatgaagaagatgaccgacaactgggagccctcctgcgagaagatcatccccgtgcccaagcagggcatcttgaagggcgacgtgagcatgtacctgctgctgaaggacggtggccgcttgcgctgccagttcgacaccgtgtacaaggccaagtccgtgccccgcaagatgcccgactggcacttcatccagcacaagctgacccgcgaggaccgcagcgacgccaagaaccagaagtggcacctgaccgagcacgccatcgcctccggctccgccttgccctccggactcagatctcgatagggtaccaatggccagttaacagatccagctgctgctgttctagggttcacaagtctgcctatttgtcttccccaatggagctatggttgtctggtctggtccttggtcgtgtcccgtttcattgtgtactatttacctgtaatgtgtatccttaagtctggtttgatggtgtctgaaacgttttgctgtggtagagcagcatggaagaactataatgaataagtgatccctaatcattgtgtccaaattttgcttctgctatacccttttgtgctgtttcttatgttttgcttaaaaatttgatctgacaaacaaatttgtctaaattatgctcttgttctgactgtgtactgtacacatttgtattgctaccggtttggcacatagttttctctttgattgcagatcaaacccttctgattgcagattgcttggctatggctgatgtgctcactgttcttctttagcttgtatattgctgatggtggcttggctacggctgaaaaagttgctgctgcgccgacttggcaactgttgctccagtaatgctttgtcctctcttcctagccgccgacttggcacttggcagctgttgctcctgtaatgcgttgttatctcttatctcttgagatgtactatgattttgaggctgtttgacttgtgccagattgccagtgctgatgctatattatctcaggtttttatgctagtatatgttttactgtgtgctgcctgtgtcgagttacgtaatctattgaaccgctatgcgtgttgatgccctgttgttgcttgccagattgatgcccctgttgcttgcagcttgcaagctgtagtgaaatcctaaaattcgaaaccaaatctattctgaacttttgaagatctgtgatgtccggaagaaaagattcaaacagataaacgggactctccagaatctataaaataaatgatcgacaaacgctttgctttggtaggcttcctagttagttagcggaccgaagcttcggtccgggcctagaaggccagcttcggccgcccctcggtaccctgggatctgcccttactttaacgcctctaaccaacacccctttatctttataaggaacaataaacagaatttgccccactgttctaaatcacctaataatatccccagctaaaaacaataaaggtttcctagaattaagacaagcatgactgttcctccaggagggtttggaacattgttgcagtcttgcagatacgggcgaagggtgagaaacagagcggagggctggaggtgacctcggtagtcgacgccggagttgagcttgacaacgacggggcggcccctgatggacttgaggaagtccgatggcgtcttcaccgtcccgccggcgcccgaggcgggcctgtcgctgccgccgccgccgctgctcatcttgcgcgctgtgcccccggcggtgtccctgtgttgcggatcgcgggtgggccaggtggatgcgagggcgacccgtttggactccggccggagccgccggatccctggtcggtgtcagtgccgtttactctgggccccacgtgtcagtaccgtctgtagatgacaacaacccgtcgtccacagtcatgtccaaaatatcctttcttcttttttttcgattcggatatctatcttccttttttttttccaaaaatcttcttgacgcaccagcgcgcacgtttgtggtaaacgccgacacgtcggtcccacgtcgatagaccccacccaccagtgagtagcgtgtacgtattcgggggtgacggacgtgtcgccgtcgtcttgctagtcccattcccatctgagccacacatctctgaacaaaaaaaaggagggaggcctccacgcacatccccctccgtgccacccgccccaaaccctcgcgccgcctccgagacagccgccgcaaccatggccaccgccgccgccgcgtctaccgcgctcactggcgccactaccgctgcgcccaaggcgaggcgccgggcgcacctcctggccacccgccgcgccctcgccgcgcccatcaggtgctcagcggcgtcacccgccatgccgatggctcccccggccaccccgctccggccgtggggccccaccgagccccgcaagggtgctgacatcctcgtcgagtccctcgagcgctgcggcgtccgcgacgtcttcgcctaccccggcggcgcgtccatggagatccaccaggcactcacccgctcccccgtcatcgccaaccacctcttccgccacgagcaaggggaggcctttgccgcctccggctacgcgcgctcctcgggccgcgtcggcgtctgcatcgccacctccggccccggcgccaccaacctagtctccgcgctcgccgacgcgctgctcgattccgtccccatggtcgccatcacgggacaggtggcgcgacgcatgattggcaccgacgccttccaggagacgcccatcgtcgaggtcacccgctccatcaccaagcacaactacctggtcctcgacgtcgacgacatcccccgcgtcgtgcaggaggctttcttcctcgcctcctctggtcgaccagggccggtgcttgtcgacatccccaaggacatccagcagcagatggcggtgcctgtctgggacaagcccatgagtctgcctgggtacattgcgcgccttcccaagccccctgcgactgagttgcttgagcaggtgctgcgtcttgttggtgaatcgcggcgccctgttctttatgtgggcggtggctgcgcagcatctggtgaggagttgcgacgctttgtggagctgactggaatcccggtcacaactactcttatgggcctcggcaacttccccagcgacgacccactgtctctgcgcatgctaggtatgcatgggacggtgtatgcaaattatgcagtggataaggccgatctgttgcttgcacttggtgtgcggtttgatgatcgcgtgacagggaagattgaggcttttgcaagcagggctaagattgtgcacgttgatattgatccggctgagattggcaagaacaagcagccacatgtgtccatctgtgcagatgttaagcttgctttgcagggcatgaatgctcttcttgaaggaagcacatcaaagaagagctttgactttggctcatggaacgatgagttggatcagcagaagagggaattcccccttgggtataaaacatctaatgaggagatccagccacaatatgctattcaggttcttgatgagctgacgaaaggcgaggccatcatcggcacaggtgttgggcagcaccagatgtgggcggcacagtactacacttacaagcggccaaggcagtggttgtcttcagctggtcttggggctatgggatttggtttgccggctgctgctggtgcttctgtggcaaacccaggtgtcactgttgttgacatcgatggagatggtagctttctcatgaacgttcaggagctagctatgatccgaattgagaacctcccagtgaaggtctttgtgctaaacaaccagcacctggggatggtggtgcagttggaggacaggttctataaggccaacagagcgcacacatacttgggaaacccagagaatgaaagtgagatatatccagatttcgtgacgatcgccaaagggttcaacattccagccgtccgtgtgacaaagaagaacgaagtccgcgcagcgataaagaagatgctcgagactccagggccgtacctcttggatataatcgtcccacaccaggagcatgtgttgcctatgatccctagtggtggggctttcaaggatatgatcctggatggtgatggcaggactgtgtactgacttcgaataggtacccggggatcctctagtgccgtgggtcgtttaagctgccgctgtacctgtgtcgtctggtgccttctggtgtacctgggaggttgtcgtctatcaagtatctgtggttggtgtcatgagtcagtgagtcccaatactgttcgtgtcctgtgtgcattatacccaaaactgttatgggcaaatcatgaataagcttgatgttcgaacttaaaagtctctgctcaatatggtattatggttgtttttgttcgtctcctaatatttgcctgggatcaaattttattggctggtgttcatttgacctccatgttcttgctaggctccattttttactctacagccataatatgtttgattgtttggtttgttctttgttgtacacctggttctgtcgagcttagttttcgacactggcttacagcttaacatgttgctattttattgggttctgattgctattttattgggttctgattgctagtttttgctgaatccaaaaaccatgttatttatttaagcgatccaggttattattatgatggtggctaagtttttttttttccaagggtaaattttctggattctccagtgtttctgtggccgaattcaatcactagagtcgacctgcaaagcttcggtccgggcctagaaggcccgcgccacttacgcttgattccgatgacttcgtaggttcctagctcaagccgctcgtgtccaagcgtcacttacgattagctaatgattacggcatctaggaccgactagttcttatgtgcttctagtctccaaatgtggttgatagttattttgctctaagatcaacagtaatgaagtataaatcatcgttgtggtgtgctactcggttaattgagcattaacacacacaaacatgacgaggatggtataatctccaaaaatgtgtactttgttaggtgggaccctatagccttgattaatgtgctatgttaggcatgcctggaaacgtgtgacgcatatgttttgtgaacctgttgatattatatgtgcttttatattaccatattttattaaaatactaatatttattactagtaagatataacattctatctagcttaaaaactaaccataaatattccataataactagatttaccaaactaatatactaaatatacataataaatacaaaattaacaagacaataatcaatatttatgagcttaatatatttagacattatggttggtcgacgataatcatgctaacttttcgtaattgcttgattgaaatatgcttagaataatgcctctttgttctacatggcaaatagggaccattatggtgtaacaccctgggaaccacaaacaccccgaaatgctactaaactacacaactaaccttcatatataaaatttcgacagcatctcctttgaaaatttgcatagacgtggaagcaacagagtataaacagatctgcgtttaaacgtgcaagcgctactagacaattcagtacattaaaaacgtccgcaatgtgttattaagttgtctaagcgtcaatttgtttacaccacaatatatcctgcca

SEQ ID NO: 159 - DNA, 21414 bp, unidentified
  source 1..21414: mol_type = other DNA; note = Artificial
gtttacccgccaatatatcctgtcaaacactgcggccgcacttgaccgcggatggagccggagctgtggtgaggccatcgacgggaggtgggggagaacacagtctcagtgttctttgtgagtccgcaaggtttttagcttttctgtattaattaaggttgctgttggctgtagaatacggtcgtggaagagctgtatcggtagctactacgtaagctattatatactggaagtctggagctcgtcgatctccggtcgtcttcctccatttctcctcgtcttgctttgactgctgctaccatttgcttctgttttctgatgaagcatgccatgtcggccaccagtgtttgtgtggtttttgcagggaatggctttcaagtgctgtgattgaatggccctcgtcgtcctcggctgagctcacatggacgcgtcatgtgagtgagatatatgatcatatgatgagtggggttcgggtgagtgcgtacttgaagtaggatcccgctttcactcattcattcattggcctttaaaccgggaaattttcgcgaggagatggagggaagcaagcagggtgacgagtgcagagtgccgcgagcgctttgtcaaaaggcaccgccgtaggcaaaaaaatcaatggccctgactgactcgatggtagtactactgtagagactagagagggttgctccccatatcttcgtgtgacttttactccagcattgcatttccgtcattgagacgttaattaatagcagctttcgggacagatgactgtggccatgtttcgtcacggccgcttcgtgccagctgggggtactatagtactgtgattttgttagtaaaaactttcattaggccaccattgacgaccgggccttcgcttttgctgcgctaattaaccatttcccggcgaccgaagggaacatgaacatgccccgacacatgagggcatgaggactagtgttctccctgtcgttcgttgacttgactagtgatagtttaaacgctcttcaactggaagagcggttactaccggttcactagctagctgctaatcgagctagttaccctatgaggtgacatgaagcgctcacggttactatgacggttagcttcacgactgttggtggcagtagcgtacgacttagctatagttccggacttacctagctaataacttcgtatagcatacattatacgaagttatggttaccgccctggccgaagctttccggacttacccttaagcgatttaaatcctgaggcctgcaacactgatagtttaaactgaaggcgggaaacgacaatctgatcatgagcggagaattaagggagtcacgttatgacccccgccgatgacgcgggacaagccgttttacgtttggaactgacagaaccgcaacgattgaaggagccactcagccgcgggtttctggagtttaatgagctaagcacatacgtcagaaaccattattgcgcgttcaaaagtcgcctaaggtcactatcagctagcaaatatttcttgtcaaaaatgctccactgacgttccataaattcccctcggtatccaattagagtctcatattcactcccatggcggccaatgcgggcggcggtggagcgggaggaggcagcggcagcggcagcgtggctgcgccggcggtgtgccgccccagcggctcgcggtggacgccgacgccggagcagatcaggatgctgaaggagctctactacggctgcggcatccggtcgcccagctcggagcagatccagcgcatcaccgccatgctgcggcagcacggcaagatcgagggcaagaacgtcttctactggttccagaaccacaaggcccgcgagcgccagaagcgccgcctcaccagcctcgacgtcaacgtgcccgccgccggcgcggccgacgccaccaccagccaactcggcgtcctctcgctgtcgtcgccgccgccttcaggcgcggcgcctccctcgcccaccctcggcttctacgccgccggcaatggcggcggatcggctgtgctgctggacacgagttccgactggggcagcagcggcgctgctatggccaccgagacatgcttcctgcaggactacatgggcgtgacggacacgggcagctcgtcgcagtggccacgcttctcgtcgtcggacacgataatggcggcggccgcggcgcgggcggcgacgacgcgggcgcccgagacgctccctctcttcccgacctgcggcgacgacggcggcagcggtagcagcagctacttgccgttctggggtgccgcgtccacaactgccggcgccacttcttccgttgcgatccaacagcaacaccagctgcaggagcagtacagcttttacagcaacagcaacagcacccagctggccggcaccggcaaccaagacgtatcggcaacagcagcagcagccgccgccctggagctgagcctcagctcatggtgctccccttaccctgctgcagggagtatgtgagagcaacgcgagctgccactgctcttcactgatgtctctggaatggaaggaggaggaagtgagaacagatcattcgacaaagcagcattagtccgttgatcggtggaagaccactcgtcagtgttgagttgaatgtttgatcaataaaatacggcaatgctgtaagggttgttttttatgccattgataatacactgtactgttcagttgttgaactctatttcttagccatgccaagtgcttttcttattttgaataacattacagcaaaaagttgaaagacaaaaaaaaaaacccccgaacagagtgctttgggtcccaagcttctttagactgtgttcggcgttccccctaaatttctccccctatatctcactcacttgtcacatcagcgttctctttccccctatatctccacgctctacagcagttccacctatatcaaacctctataccccaccacaacaatattatatactttcatcttcaactaactcatgtaccttccaatttttttctactaataattatttacgtgcacagaaacttagcaaggagagagagagcgggaatttaaatgctcggcgttaggcttttagtccgctaggtggctagaccgaggttaggacgctagttcactaggggcctagtggtgttttaagacgtcacggtcaccgcggccgcatcgagcagctggcttgtggggaccagacaaaaaaggaatggtgcagaattgttaggcgcacctaccaaaagcatctttgcctttattgcaaagataaagcagattcctctagtacaagtggggaacaaaataacgtggaaaagagctgtcctgacagcccactcactaatgcgtatgacgaacgcagtgacgaccacaaaactcgagcaacgagatcatgagccaatcaaagaggagtgatgtagacctaaagcaataatggagccatgacgtaagggcttacgcccatacgaaataattaaaggctgatgtgacctgtcggtctctcagaacctttactttttatgtttggcgtgtatttttaaatttccacggcaatgacgatgtgaccgtcgacccactaaaacattgctttgtcaaaagctaaaaaagatgatgcccgacagccacttgtgtgaagcatgagaagccggtccctccactaagaaaattagtgaagcatcttccagtggtccctccactcacagctcaatcagtgagcaacaggacgaaggaaatgacgtaagccatgacgtctaatcccattcgaaacgcgtggaccgaagcttgcatgcctgcagtgcagcgtgacccggtcgtgcccctctctagagataatgagcattgcatgtctaagttataaaaaattaccacatattttttttgtcacacttgtttgaagtgcagtttatctatctttatacatatatttaaactttactctacgaataatataatctatagtactacaataatatcagtgttttagagaatcatataaatgaacagttagacatggtctaaaggacaattgagtattttgacaacaggactctacagttttatctttttagtgtgcatgtgttctcctttttttttgcaaatagcttcacctatataatacttcatccattttattagtacatccatttagggtttagggttaatggtttttatagactaatttttttagtacatctattttattctattttagcctctaaattaagaaaactaaaactctattttagtttttttatttaataatttagatataaaatagaataaaataaagtgactaaaaattaaacaaataccctttaagaaattaaaaaaactaaggaaacatttttcttgtttcgagtagataatgccagcctgttaaacgccgtcgacgagtctaacggacaccaaccagcgaaccagcagcgtcgcgtcgggccaagcgaagcagacggcacggcatctctgtcgctgcctctggacccctctcgagagttccgctccaccgttggacttgctccgctgtcggcatccagaaattgcgtggcggagcggcagacgtgagccggcacggcaggcggcctcctcctcctctcacggcaccggcagctacgggggattcctttcccaccgctccttcgctttcccttcctcgcccgccgtaataaatagacaccccctccacaccctctttccccaacctcgtgttgttcggagcgcacacacacacaaccagatctcccccaaatccacccgtcggcacctccgcttcaaggtacgccgctcgtcctcccccccccccctctctaccttctctagatcggcgttccggtccatgcatggttagggcccggtagttctacttctgttcatgtttgtgttagatccgtgtttgtgttagatccgtgctgctagcgttcgtacacggatgcgacctgtacgtcagacacgttctgattgctaacttgccagtgtttctctttggggaatcctgggatggctctagccgttccgcagacgggatcgatttcatgattttttttgtttcgttgcatagggtttggtttgcccttttcctttatttcaatatatgccgtgcacttgtttgtcgggtcatcttttcatgcttttttttgtcttggttgtgatgatgtggtctggttgggcggtcgttctagatcggagtagaattctgtttcaaactacctggtggatttattaattttggatctgtatgtgtgtgccatacatattcatagttacgaattgaagatgatggatggaaatatcgatctaggataggtatacatgttgatgcgggttttactgatgcatatacagagatgctttttgttcgcttggttgtgatgatgtggtgtggttgggcggtcgttcattcgttctagatcggagtagaatactgtttcaaactacctggtgtatttattaattttggaactgtatgtgtgtgtcatacatcttcatagttacgagtttaagatggatggaaatatcgatctaggataggtatacatgttgatgtgggttttactgatgcatatacatgatggcatatgcagcatctattcatatgctctaaccttgagtacctatctattataataaacaagtatgttttataattattttgatcttgatatacttggatgatggcatatgcagcagctatatgtggatttttttagccctgccttcatacgctatttatttgcttggtactgtttcttttgtcgatgctcaccctgttgtttggtgttacttctgcaggtcgactttaacttagcctaggatccatggccactgtgaacaactggctcgctttctccctctccccgcaggagctgccgccctcccagacgacggactccacactcatctcggccgccaccgccgaccatgtctccggcgatgtctgcttcaacatcccccaagattggagcatgaggggatcagagctttcggcgctcgtcgcggagccgaagctggaggacttcctcggcggcatctccttctccgagcagcatcacaaggccaactgcaacatgatacccagcactagcagcacagtttgctacgcgagctcaggtgctagcaccggctaccatcaccagctgtaccaccagcccaccagctcagcgctccacttcgcggactccgtaatggtggcttcctcggccggtgtccacgacggcggtgccatgctcagcgcggccgccgctaacggtgtcgctggcgctgccagtgccaacggcggcggcatcgggctgtccatgattaagaactggctgcggagccaaccggcgcccatgcagccgagggtggcggcggctgagggcgcgcaggggctctctttgtccatgaacatggcggggacgacccaaggcgctgctggcatgccacttctcgctggagagcgcgcacgggcgcccgagagtgtatcgacgtcagcacagggtggagccgtcgtcgtcacggcgccgaaggaggatagcggtggcagcggtgttgccggcgctctagtagccgtgagcacggacacgggtggcagcggcggcgcgtcggctgacaacacggcaaggaagacggtggacacgttcgggcagcgcacgtcgatttaccgtggcgtgacaaggcatagatggactgggagatatgaggcacatctttgggataacagttgcagaagggaagggcaaactcgtaagggtcgtcaagtctatttaggtggctatgataaagaggagaaagctgctagggcttatgatcttgctgctctgaagtactggggtgccacaacaacaacaaattttccagtgagtaactacgaaaaggagctcgaggacatgaagcacatgacaaggcaggagtttgtagcgtctctgagaaggaagagcagtggtttctccagaggtgcatccatttacaggggagtgactaggcatcaccaacatggaagatggcaagcacggattggacgagttgcagggaacaaggatctttacttgggcaccttcagcacccaggaggaggcagcggaggcgtacgacatcgcggcgatcaagttccgcggcctcaacgccgtcaccaacttcgacatgagccgctacgacgtgaagagcatcctggacagcagcgccctccccatcggcagcgccgccaagcgcctcaaggaggccgaggccgcagcgtccgcgcagcaccaccacgccggcgtggtgagctacgacgtcggccgcatcgcctcgcagctcggcgacggcggagccctggcggcggcgtacggcgcgcactaccacggcgccgcctggccgaccatcgcgttccagccgggcgccgccagcacaggcctgtaccacccgtacgcgcagcagccaatgcgcggcggcgggtggtgcaagcaggagcaggaccacgcggtgatcgcggccgcgcacagcctgcaggacctccaccacctgaacctgggcgcggccggcgcgcacgactttttctcggcagggcagcaggccgccgccgctgcgatgcacggcctgggtagcatcgacagtgcgtcgctcgagcacagcaccggctccaactccgtcgtctacaacggcggggtcggcgacagcaacggcgccagcgccgtcggcggcagtggcggtggctacatgatgccgatgagcgctgccggagcaaccactacatcggcaatggtgagccacgagcaggtgcatgcacgggcctacgacgaagccaagcaggctgctcagatggggtacgagagctacctggtgaacgcggagaacaatggtggcggaaggatgtctgcatgggggactgtcgtgtctgcagccgcggcggcagcagcaagcagcaacgacaacatggccgccgacgtcgggcatggcggcgcgcagctcttcagtgtctggaacgacacttaagcgtacctagtggtacctgacatcttatagtctgcaacctctcgtgtctgaattcctatctttatcaagtgttattgcttccacgactataggacagctttcgtcgaaagcttttgctcatgtgatctcgaaggattcatctagtctgatttttcgtgacttgtatcggttttattggattcatccaacatatatcaataaaaaatgagttgtgtttcctttcttcctagttcagttaaaattatttccctcctgcgcttgtgctgtaattgtctgtgtacctgttgtttgtgactgtgttagttcccttggatatgatttcgtatttgatatgtacatggagatagcttagcttcattattggagtatgaagttagtatgacatagtcactctcctggaaaattgacactgcaaaccatatttttattctgaaccacaaatcctagtcagtccgctggcatatgccgtccgtttgctgaatccagaacgtgggtttggagatgtacggctgagatgcctctatgcgaaggggatttcgtggtgaaacgagatgggagtagagcaacgcccgtggaagatgcttcaaacttccacacttttgagcaacgatcggcagtagtaaggtagacgatttcaagatcaaagcatatgaagataaacaacatcaacaacaaaatttgttggggttctatagagagaaacagagctacatacatacactgttttgtatctaccatctgagatgatgaaaagatgaaaaactaaagaatgccccggcgccaacgccaggacacgccgcgcgcgcgtcacccgagccatctcttgacccagccggcgctgtatatttacacacgttgcagcatcgatcaccacctgttcgatcgcgtcgccgtcaccggcgcgccgcgacttattgaactagtctagggcgcggctaacaacctagcttagattgccttgtctaaacccttaggctaacgcgccactctagaaggccgatctcccccgaacgcgccagatccgatatcgatgggccctggccgaagcttggtcacccggtccgggcctagaaggccgatctcccgggcacccagctttcttgtacaaagtggccgttaacggatcggccagaatggcccggaccgggttaccccgcgggacttttttggtggatttggataaaagtgcattcgggtcatatggtacattctcctattaaataaatatggtgcactcctatgttattagctaaaatgtttagattctaattcagagtcatatcattaataaaattaatattaacaaaataaatagctttttggcaagacggatttggagggacgggtttttgaatcaacattaataaaaaagtaaaatataattaatccaccgtttcaatacgggttaaatctttaatttattattttttaagaccactaatattaaacatatcaaatcatcctaatttagaaaagattatataaaaccaaaaatgttatgtggtatgtataatgttactatatataaaattaaactatagatataaatatattagagaatgatacaatttgcaaaacttttctatataaaaaattattcttaaatgttaaaaattactatttttaaaaaaaatcacgggacggtaaaaaaattacagagaattcgagctcggtaccctggttcacaaactcaatacaacacacagtggagtagggtattacgctccggcggcccgaaccactctaaatccttgtgtcctcgtgtgctcttccaccattaatgactgtaattgcagggacacgaagagttgtagcgcttttgccaacaagatccgctatatgctagtagagtggaacctgcacagcaacaagcatccaataatctgagaataagaattatgtgtggtgatggttctcatctctgcaactcgccattttcgcgagagaaccaaatccaagttggtgaagatcatgatttgggctcatgggctggcatagtagctattacctttgcaattgtggttcgaatctatccgatattctccttttcagggagagctaatgcttatgcttattgggtattttggtttgacactgcttcacgcccaaaaaaaggcaactatgtctgagttggatatggcccaaaaaaaggcagctatgtctgagttggatatggaagtcttctttcgtttagggtgaagtaagaccaagctcatgagcttattatcttaggtcggaacaaattagttgataggcatggcacatttatcaaattataatgattttaacagaaaagcaacacctctttttcagcagcaccagctttgcaagctgcaattgacactccaagcatagtatttgctccaaactcagcctgcatttcgcacaatatcatatctatttccatttggataaaatatattttccagaaatatgggaacagaatcaagatacagaaaaaagttgtggtagtagtggtaagtggaaacacaagtacagtgaaaagatagcattatttctgaacagtcaaattaaccgaaataagtagtatcacatactgcccctaaattgactacacccaatgtaaagaattgcttgagcatattgagccatcagttgtttgtttgtgtaacggatttgacaatgcagagttcaggagcaaaaaaccgcaaaggagagaaagagggaaaggatctcctagtatcccaccttgtggcgcgccctgtcaagtgcatgatggcctggtcgatctgcgtctgctgctgcggttccatcccaacgagtgcctccgacaccttgtcgttgatcacccgcaccgcgtaggcgacccccctggcgaggaacttccgcctctcggaggccccggccgcgtcggcggcggcgccctcgagcgcgcccacgctagccgtagatgctcggtgcacggccttgttggtgtgcaactcgacctcaacggccggtgcgctacgcccgtcaaggatctggcgcgcccgcaccctcgtgatcacggtgggcgcctcccgcctcatgtggccgacgatgaaaagcgccgggttaggggccttggcgcgcaccgccgtattcagggcctcctcgctcttgcgcgagagcaggtgcttccccaggtactcctgcactgacaaggctgccacagcggtggaatttgtcctcacgacttcgccacgtcgtcctcacctccctggcttcccacgactccgccgtatcgaggtgctcggtgggtcgtcttaatccgaagtccgaactaggaagacgagacagagaggtctgaggaatgggcctcgtttgatgttgagctgaattatttttccagcataagcccaggtcttggtccatgaacaaaattactagaaacccagcccagtactacgatctaaaagagggactgccactggatagctctctctagcattctccacgctccaatacagcggcgtcgtgtctatccgggtctatccgcgaacacgtgagaactctccagaaactgctttctcctccacttcatctctctcgctttccctctataaaaagaccccttctaggaattgagggagacagcaagcaccaagcagcgatccgaagctcaatcaattcactcaaacctcttccccaaatcttcgattagatcttcgttgacaagaagactagaaccgaacctgacatgtccaacctgctcacggttcaccagaaccttccggctcttccagtggacgcgacgtccgatgaagtcaggaagaacctcatggacatgttccgcgacaggcaagcgttcagcgagcacacctggaagatgctgctctccgtctgccgctcctgggctgcatggtgcaagctgaacaacaggaagtggttccccgctgagcccgaggacgtgagggattaccttctgtacctgcaagcgcgaggtttgtttctgcttctacctttgatatatatataataattatcattaattagtagtaatataatatttcaaatatttttttcaaaataaaagaatgtagtatatagcaattgcttttctgtagtttataagtgtgtatattttaatttataacttttctaatatatgaccaaaacatggtgatgcctaggtctggcagtgaagaccatccagcaacaccttggacaactgaacatgcttcacaggcgctccggcctcccgcgccccagcgactcgaacgccgtgagcctcgtcatgcgccgcatcaggaaggaaaacgtcgatgccggcgaaagggcaaagcaggccctcgcgttcgagaggaccgatttcgaccaggtccgcagcctgatggagaacagcgacaggtgccaggacattaggaacctggcgttcctcggaattgcatacaacacgctcctcaggatcgcggaaattgcccgcattcgcgtgaaggacattagccgcaccgacggcggcaggatgcttatccacattggcaggaccaagacgctcgtttccaccgcaggcgtcgaaaaggccctcagcctcggagtgaccaagctcgtcgaacgctggatctccgtgtccggcgtcgcggacgacccaaacaactacctcttctgccgcgtccgcaagaacggggtggctgcccctagcgccaccagccaactcagcacgagggccttggaaggtattttcgaggccacccaccgcctgatctacggcgcgaaggatgacagcggtcaacgctacctcgcatggtccgggcactccgcccgcgttggagctgctagggacatggcccgcgccggtgtttccatccccgaaatcatgcaggcgggtggatggacgaacgtgaacattgtcatgaactacattcgcaaccttgacagcgagacgggcgcaatggttcgcctcctggaagatggtgactgaggtacccaacctagacttgtccatcttctggattggccaacttaattaatgtatgaaataaaaggatgcacacatagtgacatgctaatcactataatgtgggcatcaaagttgtgtgttatgtgtaattactagttatctgaataaaagagaaagagatcatccatatttcttatcctaaatgaatgtcacgtgtctttataattctttgatgaaccagatgcatttcattaaccaaatccatatacatataaatattaatcatatataattaatatcaattgggttagcaaaacaaatctagtctaggtgtgttttgcgatccgataatcgatgggtctaaaaacggcccctaactaacgcttagttgcccgctagattagtcccccgttagtgcctagttagacacacgacgaactaggggctagcacgcgttagataacttcgtatagcatacattatacgaagttattccggaccgggttaccgaattcaattcctgcccttaaggccaattgttcaagattcattcaacaattgaaacatctcccatgattaaatcagtataaggttgctatggtcttgcttgacaaagtttttttttgagggaatttcaactaaatttttgagtgaaactatcaaatactgattttaaaaaatttttataaaaggaagcgcagagataaaaggccatctatgctacaaaagtacccaaaaatgtaatcctaaagtatgaattgcattttttttttgtttggacgaaaggaaaggagtattaccacaagaatgatatcatcttcatatttagatcttttttgggtaaagcttgagattctctaaatatagagaaatcagaagaaaaaaaaaccgtgttttggtggttttgatttctagcctccacaataactttgacggcgtcgacaagtctaacggacaccaagcagcgaaccaccagcgccgagccaagcgaagcagacggccgagacgttgacaccttcggcgcggcatctctcgagagttccgctccggcgctccacctccaccgctggcggtttcttattccgttccgttccgcctcctgctctgctcctctccacaccacacggcacgaaaccgttacggcaccggcagcacccagcacgggagaggggattcctttcccaccgttccttccctttccgccccgccgctataaatagccagccccatccccagcttttttccccaatctcatctcctctctcctgttgttcggagcacacgcacaatccgatcgatccccaaatccccttcgtctctcctcgcgagcctcgtggatcccagcttcaaggtacggcgatcgatcatcccccctccttctctctaccttcttttctctagactacatcggatggcgatccatggttagggcctgctagtttcccttcctgttttgtcgatggctgcgaggcacaatagatctgatggcgttatgacggctaacttgtcatgttgttgcgatttatagtccctttaggagatcagtttaatttctcggatggttcgagatcggtggtccatggttagtaccctaagatccgcgctgttagggttcgtagatggaggcgacctgttctgattgttaacttgtcagtacctgggaaatcctgggatggttctagctcgtccgcagatgagatcgatttcatgatcctctgtatcttgtttcgttgcctaggttccgtctaatctatccgtggtatgatgtagatgttttgatcgtgctaactacgtcttgtaaagttaattgtcaggtcataatttttagcatgcctttttttttgtttggttttgtctaattgggctgtcgttctagatcagagtagaagactgttccaaactacctgctggatttattgaacttggatctgtatgtgtgtcacatatcttcataaattcatgattaagatggattgaaatatcttttatctttttggtatggatagttctatatgttggtgtggctttgttagatgtatacatgcttagatacatgaagcaacgtgctgctactgtttagtaattgctgttcatttgtctaataaacagataaggatatgtatttatgttgctgttggttttgctggtactttgttggatacaaatgcttcaatacagaaaacagcatgctgctacgatttaccatttatctaatcttatcatatgtctaatctaataaacaaacatgcttttaaattatcttcatatgcttggatgatggcatacacagcggctatgtgtggttttttaaatacccagcatcatgggcatgcatgacactgctttaatatgctttttatttgcttgagactgtttcttttgtttatactgaccctttagttcggtgactcttctgcaggtcgactttaacttagcctaggatccatggcccagtccaagcacggcctgaccaaggagatgaccatgaagtaccgcatggagggctgcgtggacggccacaagttcgtgatcaccggcgagggcatcggctaccccttcaagggcaagcaggccatcaacctgtgcgtggtggagggcggccccttgcccttcgccgaggacatcttgtccgccgccttcatgtacggcaaccgcgtgttcaccgagtacccccaggacatcgtcgactacttcaagaactcctgccccgccggctacacctgggaccgctccttcctgttcgaggacggcgccgtgtgcatctgcaacgccgacatcaccgtgagcgtggaggagaactgcatgtaccacgagtccaagttctacggcgtgaacttccccgccgacggccccgtgatgaagaagatgaccgacaactgggagccctcctgcgagaagatcatccccgtgcccaagcagggcatcttgaagggcgacgtgagcatgtacctgctgctgaaggacggtggccgcttgcgctgccagttcgacaccgtgtacaaggccaagtccgtgccccgcaagatgcccgactggcacttcatccagcacaagctgacccgcgaggaccgcagcgacgccaagaaccagaagtggcacctgaccgagcacgccatcgcctccggctccgccttgccctccggactcagatctcgatagggtaccaatggccagttaacagatccagctgctgctgttctagggttcacaagtctgcctatttgtcttccccaatggagctatggttgtctggtctggtccttggtcgtgtcccgtttcattgtgtactatttacctgtaatgtgtatccttaagtctggtttgatggtgtctgaaacgttttgctgtggtagagcagcatggaagaactataatgaataagtgatccctaatcattgtgtccaaattttgcttctgctatacccttttgtgctgtttcttatgttttgcttaaaaatttgatctgacaaacaaatttgtctaaattatgctcttgttctgactgtgtactgtacacatttgtattgctaccggtttggcacatagttttctctttgattgcagatcaaacccttctgattgcagattgcttggctatggctgatgtgctcactgttcttctttagcttgtatattgctgatggtggcttggctacggctgaaaaagttgctgctgcgccgacttggcaactgttgctccagtaatgctttgtcctctcttcctagccgccgacttggcacttggcagctgttgctcctgtaatgcgttgttatctcttatctcttgagatgtactatgattttgaggctgtttgacttgtgccagattgccagtgctgatgctatattatctcaggtttttatgctagtatatgttttactgtgtgctgcctgtgtcgagttacgtaatctattgaaccgctatgcgtgttgatgccctgttgttgcttgccagattgatgcccctgttgcttgcagcttgcaagctgtagtgaaatcctaaaattcgaaaccaaatctattctgaacttttgaagatctgtgatgtccggaagaaaagattcaaacagataaacgggactctccagaatctataaaataaatgatcgacaaacgctttgctttggtaggcttcctagttagttagcggaccgaagcttcggtccgggcctagaaggccagcttcggccgcccctcggtaccctgggatctgcccttactttaacgcctctaaccaacacccctttatctttataaggaacaataaacagaatttgccccactgttctaaatcacctaataatatccccagctaaaaacaataaaggtttcctagaattaagacaagcatgactgttcctccaggagggtttggaacattgttgcagtcttgcagatacgggcgaagggtgagaaacagagcggagggctggaggtgacctcggtagtcgacgccggagttgagcttgacaacgacggggcggcccctgatggacttgaggaagtccgatggcgtcttcaccgtcccgccggcgcccgaggcgggcctgtcgctgccgccgccgccgctgctcatcttgcgcgctgtgcccccggcggtgtccctgtgttgcggatcgcgggtgggccaggtggatgcgagggcgacccgtttggactccggccggagccgccggatccctggtcggtgtcagtgccgtttactctgggccccacgtgtcagtaccgtctgtagatgacaacaacccgtcgtccacagtcatgtccaaaatatcctttcttcttttttttcgattcggatatctatcttccttttttttttccaaaaatcttcttgacgcaccagcgcgcacgtttgtggtaaacgccgacacgtcggtcccacgtcgatagaccccacccaccagtgagtagcgtgtacgtattcgggggtgacggacgtgtcgccgtcgtcttgctagtcccattcccatctgagccacacatctctgaacaaaaaaaaggagggaggcctccacgcacatccccctccgtgccacccgccccaaaccctcgcgccgcctccgagacagccgccgcaaccatggccaccgccgccgccgcgtctaccgcgctcactggcgccactaccgctgcgcccaaggcgaggcgccgggcgcacctcctggccacccgccgcgccctcgccgcgcccatcaggtgctcagcggcgtcacccgccatgccgatggctcccccggccaccccgctccggccgtggggccccaccgagccccgcaagggtgctgacatcctcgtcgagtccctcgagcgctgcggcgtccgcgacgtcttcgcctaccccggcggcgcgtccatggagatccaccaggcactcacccgctcccccgtcatcgccaaccacctcttccgccacgagcaaggggaggcctttgccgcctccggctacgcgcgctcctcgggccgcgtcggcgtctgcatcgccacctccggccccggcgccaccaacctagtctccgcgctcgccgacgcgctgctcgattccgtccccatggtcgccatcacgggacaggtggcgcgacgcatgattggcaccgacgccttccaggagacgcccatcgtcgaggtcacccgctccatcaccaagcacaactacctggtcctcgacgtcgacgacatcccccgcgtcgtgcaggaggctttcttcctcgcctcctctggtcgaccagggccggtgcttgtcgacatccccaaggacatccagcagcagatggcggtgcctgtctgggacaagcccatgagtctgcctgggtacattgcgcgccttcccaagccccctgcgactgagttgcttgagcaggtgctgcgtcttgttggtgaatcgcggcgccctgttctttatgtgggcggtggctgcgcagcatctggtgaggagttgcgacgctttgtggagctgactggaatcccggtcacaactactcttatgggcctcggcaacttccccagcgacgacccactgtctctgcgcatgctaggtatgcatgggacggtgtatgcaaattatgcagtggataaggccgatctgttgcttgcacttggtgtgcggtttgatgatcgcgtgacagggaagattgaggcttttgcaagcagggctaagattgtgcacgttgatattgatccggctgagattggcaagaacaagcagccacatgtgtccatctgtgcagatgttaagcttgctttgcagggcatgaatgctcttcttgaaggaagcacatcaaagaagagctttgactttggctcatggaacgatgagttggatcagcagaagagggaattcccccttgggtataaaacatctaatgaggagatccagccacaatatgctattcaggttcttgatgagctgacgaaaggcgaggccatcatcggcacaggtgttgggcagcaccagatgtgggcggcacagtactacacttacaagcggccaaggcagtggttgtcttcagctggtcttggggctatgggatttggtttgccggctgctgctggtgcttctgtggcaaacccaggtgtcactgttgttgacatcgatggagatggtagctttctcatgaacgttcaggagctagctatgatccgaattgagaacctcccagtgaaggtctttgtgctaaacaaccagcacctggggatggtggtgcagttggaggacaggttctataaggccaacagagcgcacacatacttgggaaacccagagaatgaaagtgagatatatccagatttcgtgacgatcgccaaagggttcaacattccagccgtccgtgtgacaaagaagaacgaagtccgcgcagcgataaagaagatgctcgagactccagggccgtacctcttggatataatcgtcccacaccaggagcatgtgttgcctatgatccctagtggtggggctttcaaggatatgatcctggatggtgatggcaggactgtgtactgacttcgaataggtacccggggatcctctagtgccgtgggtcgtttaagctgccgctgtacctgtgtcgtctggtgccttctggtgtacctgggaggttgtcgtctatcaagtatctgtggttggtgtcatgagtcagtgagtcccaatactgttcgtgtcctgtgtgcattatacccaaaactgttatgggcaaatcatgaataagcttgatgttcgaacttaaaagtctctgctcaatatggtattatggttgtttttgttcgtctcctaatatttgcctgggatcaaattttattggctggtgttcatttgacctccatgttcttgctaggctccattttttactctacagccataatatgtttgattgtttggtttgttctttgttgtacacctggttctgtcgagcttagttttcgacactggcttacagcttaacatgttgctattttattgggttctgattgctattttattgggttctgattgctagtttttgctgaatccaaaaaccatgttatttatttaagcgatccaggttattattatgatggtggctaagtttttttttttccaagggtaaattttctggattctccagtgtttctgtggccgaattcaatcactagagtcgacctgcaaagcttcggtccgggcctagaaggcccgcgccacttacgcttgattccgatgacttcgtaggttcctagctcaagccgctcgtgtccaagcgtcacttacgattagctaatgattacggcatctaggaccgactagttcttatgtgcttctagtctccaaatgtggttgatagttattttgctctaagatcaacagtaatgaagtataaatcatcgttgtggtgtgctactcggttaattgagcattaacacacacaaacatgacgaggatggtataatctccaaaaatgtgtactttgttaggtgggaccctatagccttgattaatgtgctatgttaggcatgcctggaaacgtgtgacgcatatgttttgtgaacctgttgatattatatgtgcttttatattaccatattttattaaaatactaatatttattactagtaagatataacattctatctagcttaaaaactaaccataaatattccataataactagatttaccaaactaatatactaaatatacataataaatacaaaattaacaagacaataatcaatatttatgagcttaatatatttagacattatggttggtcgacgataatcatgctaacttttcgtaattgcttgattgaaatatgcttagaataatgcctctttgttctacatggcaaatagggaccattatggtgtaacaccctgggaaccacaaacaccccgaaatgctactaaactacacaactaaccttcatatataaaatttcgacagcatctcctttgaaaatttgcatagacgtggaagcaacagagtataaacagatctgcgtttaaacgtgcaagcgctactagacaattcagtacattaaaaacgtccgcaatgtgttattaagttgtctaagcgtcaatttgtttacaccacaatatatcctgcca

SEQ ID NO: 160 - DNA, 20879 bp, unidentified
  source 1..20879: mol_type = other DNA; note = Artificial
gtttacccgccaatatatcctgtcaaacactgcggccgcacttgaccgcggatggagccggagctgtggtgaggccatcgacgggaggtgggggagaacacagtctcagtgttctttgtgagtccgcaaggtttttagcttttctgtattaattaaggttgctgttggctgtagaatacggtcgtggaagagctgtatcggtagctactacgtaagctattatatactggaagtctggagctcgtcgatctccggtcgtcttcctccatttctcctcgtcttgctttgactgctgctaccatttgcttctgttttctgatgaagcatgccatgtcggccaccagtgtttgtgtggtttttgcagggaatggctttcaagtgctgtgattgaatggccctcgtcgtcctcggctgagctcacatggacgcgtcatgtgagtgagatatatgatcatatgatgagtggggttcgggtgagtgcgtacttgaagtaggatcccgctttcactcattcattcattggcctttaaaccgggaaattttcgcgaggagatggagggaagcaagcagggtgacgagtgcagagtgccgcgagcgctttgtcaaaaggcaccgccgtaggcaaaaaaatcaatggccctgactgactcgatggtagtactactgtagagactagagagggttgctccccatatcttcgtgtgacttttactccagcattgcatttccgtcattgagacgttaattaatagcagctttcgggacagatgactgtggccatgtttcgtcacggccgcttcgtgccagctgggggtactatagtactgtgattttgttagtaaaaactttcattaggccaccattgacgaccgggccttcgcttttgctgcgctaattaaccatttcccggcgaccgaagggaacatgaacatgccccgacacatgagggcatgaggactagtgttctccctgtcgttcgttgacttgactagtgatagtttaaacgctcttcaactggaagagcggttactaccggttcactagctagctgctaatcgagctagttaccctatgaggtgacatgaagcgctcacggttactatgacggttagcttcacgactgttggtggcagtagcgtacgacttagctatagttccggacttacctagctaataacttcgtatagcatacattatacgaagttatggttaccgccctggccgaagctttccggacttacccttaagcgatttaaatcctgaggcctgcaacactgatagtttaaactgaaggcgggaaacgacaatctgatcatgagcggagaattaagggagtcacgttatgacccccgccgatgacgcgggacaagccgttttacgtttggaactgacagaaccgcaacgattgaaggagccactcagccgcgggtttctggagtttaatgagctaagcacatacgtcagaaaccattattgcgcgttcaaaagtcgcctaaggtcactatcagctagcaaatatttcttgtcaaaaatgctccactgacgttccataaattcccctcggtatccaattagagtctcatattcactcccatggcggccaatgcgggcggcggtggagcgggaggaggcagcggcagcggcagcgtggctgcgccggcggtgtgccgccccagcggctcgcggtggacgccgacgccggagcagatcaggatgctgaaggagctctactacggctgcggcatccggtcgcccagctcggagcagatccagcgcatcaccgccatgctgcggcagcacggcaagatcgagggcaagaacgtcttctactggttccagaaccacaaggcccgcgagcgccagaagcgccgcctcaccagcctcgacgtcaacgtgcccgccgccggcgcggccgacgccaccaccagccaactcggcgtcctctcgctgtcgtcgccgccgccttcaggcgcggcgcctccctcgcccaccctcggcttctacgccgccggcaatggcggcggatcggctgtgctgctggacacgagttccgactggggcagcagcggcgctgctatggccaccgagacatgcttcctgcaggactacatgggcgtgacggacacgggcagctcgtcgcagtggccacgcttctcgtcgtcggacacgataatggcggcggccgcggcgcgggcggcgacgacgcgggcgcccgagacgctccctctcttcccgacctgcggcgacgacggcggcagcggtagcagcagctacttgccgttctggggtgccgcgtccacaactgccggcgccacttcttccgttgcgatccaacagcaacaccagctgcaggagcagtacagcttttacagcaacagcaacagcacccagctggccggcaccggcaaccaagacgtatcggcaacagcagcagcagccgccgccctggagctgagcctcagctcatggtgctccccttaccctgctgcagggagtatgtgagagcaacgcgagctgccactgctcttcactgatgtctctggaatggaaggaggaggaagtgagaacagatcattcgacaaagcagcattagtccgttgatcggtggaagaccactcgtcagtgttgagttgaatgtttgatcaataaaatacggcaatgctgtaagggttgttttttatgccattgataatacactgtactgttcagttgttgaactctatttcttagccatgccaagtgcttttcttattttgaataacattacagcaaaaagttgaaagacaaaaaaaaaaacccccgaacagagtgctttgggtcccaagcttctttagactgtgttcggcgttccccctaaatttctccccctatatctcactcacttgtcacatcagcgttctctttccccctatatctccacgctctacagcagttccacctatatcaaacctctataccccaccacaacaatattatatactttcatcttcaactaactcatgtaccttccaatttttttctactaataattatttacgtgcacagaaacttagcaaggagagagagagcgggaatttaaatgctcggcgttaggcttttagtccgctaggtggctagaccgaggttaggacgctagttcactaggggcctagtggtgttttaagacgtcacggtcaccgcggccgcatcgagcagctggcttgtggggaccagacaaaaaaggaatggtgcagaattgttaggcgcacctaccaaaagcatctttgcctttattgcaaagataaagcagattcctctagtacaagtggggaacaaaataacgtggaaaagagctgtcctgacagcccactcactaatgcgtatgacgaacgcagtgacgaccacaaaactcgagcaacgagatcatgagccaatcaaagaggagtgatgtagacctaaagcaataatggagccatgacgtaagggcttacgcccatacgaaataattaaaggctgatgtgacctgtcggtctctcagaacctttactttttatgtttggcgtgtatttttaaatttccacggcaatgacgatgtgaccgtcgacccactaaaacattgctttgtcaaaagctaaaaaagatgatgcccgacagccacttgtgtgaagcatgagaagccggtccctccactaagaaaattagtgaagcatcttccagtggtccctccactcacagctcaatcagtgagcaacaggacgaaggaaatgacgtaagccatgacgtctaatcccattcgaaacgcgtggaccgaagcttgcatgcctgcagtgcagcgtgacccggtcgtgcccctctctagagataatgagcattgcatgtctaagttataaaaaattaccacatattttttttgtcacacttgtttgaagtgcagtttatctatctttatacatatatttaaactttactctacgaataatataatctatagtactacaataatatcagtgttttagagaatcatataaatgaacagttagacatggtctaaaggacaattgagtattttgacaacaggactctacagttttatctttttagtgtgcatgtgttctcctttttttttgcaaatagcttcacctatataatacttcatccattttattagtacatccatttagggtttagggttaatggtttttatagactaatttttttagtacatctattttattctattttagcctctaaattaagaaaactaaaactctattttagtttttttatttaataatttagatataaaatagaataaaataaagtgactaaaaattaaacaaataccctttaagaaattaaaaaaactaaggaaacatttttcttgtttcgagtagataatgccagcctgttaaacgccgtcgacgagtctaacggacaccaaccagcgaaccagcagcgtcgcgtcgggccaagcgaagcagacggcacggcatctctgtcgctgcctctggacccctctcgagagttccgctccaccgttggacttgctccgctgtcggcatccagaaattgcgtggcggagcggcagacgtgagccggcacggcaggcggcctcctcctcctctcacggcaccggcagctacgggggattcctttcccaccgctccttcgctttcccttcctcgcccgccgtaataaatagacaccccctccacaccctctttccccaacctcgtgttgttcggagcgcacacacacacaaccagatctcccccaaatccacccgtcggcacctccgcttcaaggtacgccgctcgtcctcccccccccccctctctaccttctctagatcggcgttccggtccatgcatggttagggcccggtagttctacttctgttcatgtttgtgttagatccgtgtttgtgttagatccgtgctgctagcgttcgtacacggatgcgacctgtacgtcagacacgttctgattgctaacttgccagtgtttctctttggggaatcctgggatggctctagccgttccgcagacgggatcgatttcatgattttttttgtttcgttgcatagggtttggtttgcccttttcctttatttcaatatatgccgtgcacttgtttgtcgggtcatcttttcatgcttttttttgtcttggttgtgatgatgtggtctggttgggcggtcgttctagatcggagtagaattctgtttcaaactacctggtggatttattaattttggatctgtatgtgtgtgccatacatattcatagttacgaattgaagatgatggatggaaatatcgatctaggataggtatacatgttgatgcgggttttactgatgcatatacagagatgctttttgttcgcttggttgtgatgatgtggtgtggttgggcggtcgttcattcgttctagatcggagtagaatactgtttcaaactacctggtgtatttattaattttggaactgtatgtgtgtgtcatacatcttcatagttacgagtttaagatggatggaaatatcgatctaggataggtatacatgttgatgtgggttttactgatgcatatacatgatggcatatgcagcatctattcatatgctctaaccttgagtacctatctattataataaacaagtatgttttataattattttgatcttgatatacttggatgatggcatatgcagcagctatatgtggatttttttagccctgccttcatacgctatttatttgcttggtactgtttcttttgtcgatgctcaccctgttgtttggtgttacttctgcaggtcgactttaacttagcctaggatccatggccactgtgaacaactggctcgctttctccctctccccgcaggagctgccgccctcccagacgacggactccacactcatctcggccgccaccgccgaccatgtctccggcgatgtctgcttcaacatcccccaagattggagcatgaggggatcagagctttcggcgctcgtcgcggagccgaagctggaggacttcctcggcggcatctccttctccgagcagcatcacaaggccaactgcaacatgatacccagcactagcagcacagtttgctacgcgagctcaggtgctagcaccggctaccatcaccagctgtaccaccagcccaccagctcagcgctccacttcgcggactccgtaatggtggcttcctcggccggtgtccacgacggcggtgccatgctcagcgcggccgccgctaacggtgtcgctggcgctgccagtgccaacggcggcggcatcgggctgtccatgattaagaactggctgcggagccaaccggcgcccatgcagccgagggtggcggcggctgagggcgcgcaggggctctctttgtccatgaacatggcggggacgacccaaggcgctgctggcatgccacttctcgctggagagcgcgcacgggcgcccgagagtgtatcgacgtcagcacagggtggagccgtcgtcgtcacggcgccgaaggaggatagcggtggcagcggtgttgccggcgctctagtagccgtgagcacggacacgggtggcagcggcggcgcgtcggctgacaacacggcaaggaagacggtggacacgttcgggcagcgcacgtcgatttaccgtggcgtgacaaggcatagatggactgggagatatgaggcacatctttgggataacagttgcagaagggaagggcaaactcgtaagggtcgtcaagtctatttaggtggctatgataaagaggagaaagctgctagggcttatgatcttgctgctctgaagtactggggtgccacaacaacaacaaattttccagtgagtaactacgaaaaggagctcgaggacatgaagcacatgacaaggcaggagtttgtagcgtctctgagaaggaagagcagtggtttctccagaggtgcatccatttacaggggagtgactaggcatcaccaacatggaagatggcaagcacggattggacgagttgcagggaacaaggatctttacttgggcaccttcagcacccaggaggaggcagcggaggcgtacgacatcgcggcgatcaagttccgcggcctcaacgccgtcaccaacttcgacatgagccgctacgacgtgaagagcatcctggacagcagcgccctccccatcggcagcgccgccaagcgcctcaaggaggccgaggccgcagcgtccgcgcagcaccaccacgccggcgtggtgagctacgacgtcggccgcatcgcctcgcagctcggcgacggcggagccctggcggcggcgtacggcgcgcactaccacggcgccgcctggccgaccatcgcgttccagccgggcgccgccagcacaggcctgtaccacccgtacgcgcagcagccaatgcgcggcggcgggtggtgcaagcaggagcaggaccacgcggtgatcgcggccgcgcacagcctgcaggacctccaccacctgaacctgggcgcggccggcgcgcacgactttttctcggcagggcagcaggccgccgccgctgcgatgcacggcctgggtagcatcgacagtgcgtcgctcgagcacagcaccggctccaactccgtcgtctacaacggcggggtcggcgacagcaacggcgccagcgccgtcggcggcagtggcggtggctacatgatgccgatgagcgctgccggagcaaccactacatcggcaatggtgagccacgagcaggtgcatgcacgggcctacgacgaagccaagcaggctgctcagatggggtacgagagctacctggtgaacgcggagaacaatggtggcggaaggatgtctgcatgggggactgtcgtgtctgcagccgcggcggcagcagcaagcagcaacgacaacatggccgccgacgtcgggcatggcggcgcgcagctcttcagtgtctggaacgacacttaagcgtacctagtggtacctgacatcttatagtctgcaacctctcgtgtctgaattcctatctttatcaagtgttattgcttccacgactataggacagctttcgtcgaaagcttttgctcatgtgatctcgaaggattcatctagtctgatttttcgtgacttgtatcggttttattggattcatccaacatatatcaataaaaaatgagttgtgtttcctttcttcctagttcagttaaaattatttccctcctgcgcttgtgctgtaattgtctgtgtacctgttgtttgtgactgtgttagttcccttggatatgatttcgtatttgatatgtacatggagatagcttagcttcattattggagtatgaagttagtatgacatagtcactctcctggaaaattgacactgcaaaccatatttttattctgaaccacaaatcctagtcagtccgctggcatatgccgtccgtttgctgaatccagaacgtgggtttggagatgtacggctgagatgcctctatgcgaaggggatttcgtggtgaaacgagatgggagtagagcaacgcccgtggaagatgcttcaaacttccacacttttgagcaacgatcggcagtagtaaggtagacgatttcaagatcaaagcatatgaagataaacaacatcaacaacaaaatttgttggggttctatagagagaaacagagctacatacatacactgttttgtatctaccatctgagatgatgaaaagatgaaaaactaaagaatgccccggcgccaacgccaggacacgccgcgcgcgcgtcacccgagccatctcttgacccagccggcgctgtatatttacacacgttgcagcatcgatcaccacctgttcgatcgcgtcgccgtcaccggcgcgccgcgacttattgaactagtctagggcgcggctaacaacctagcttagattgccttgtctaaacccttaggctaacgcgccactctagaaggccgatctccccgggtttaccgagctcgcggggggcatgtgttttgcaccatatttggcactgggcacggtcgaatggtccgaccatatggcctggacagtttgggcccagacggtctacgggttacgctagatggcacaccatctagaggttcacaaactcaatacaacacacagtggagtagggtattacgctccggcggcccgaaccactctaaatccttgtgtcctcgtgtgctcttccaccattaatgactgtaattgcagggacacgaagagttgtagcgcttttgccaacaagatccgctatatgctagtagagtggaacctgcacagcaacaagcatccaataatctgagaataagaattatgtgtggtgatggttctcatctctgcaactcgccattttcgcgagagaaccaaatccaagttggtgaagatcatgatttgggctcatgggctggcatagtagctattacctttgcaattgtggttcgaatctatccgatattctccttttcagggagagctaatgcttatgcttattgggtattttggtttgacactgcttcacgcccaaaaaaaggcaactatgtctgagttggatatggcccaaaaaaaggcagctatgtctgagttggatatggaagtcttctttcgtttagggtgaagtaagaccaagctcatgagcttattatcttaggtcggaacaaattagttgataggcatggcacatttatcaaattataatgattttaacagaaaagcaacacctctttttcagcagcaccagctttgcaagctgcaattgacactccaagcatagtatttgctccaaactcagcctgcatttcgcacaatatcatatctatttccatttggataaaatatattttccagaaatatgggaacagaatcaagatacagaaaaaagttgtggtagtagtggtaagtggaaacacaagtacagtgaaaagatagcattatttctgaacagtcaaattaaccgaaataagtagtatcacatactgcccctaaattgactacacccaatgtaaagaattgcttgagcatattgagccatcagttgtttgtttgtgtaacggatttgacaatgcagagttcaggagcaaaaaaccgcaaaggagagaaagagggaaaggatctcctagtatcccaccttgtggcgcgccctgtcaagtgcatgatggcctggtcgatctgcgtctgctgctgcggttccatcccaacgagtgcctccgacaccttgtcgttgatcacccgcaccgcgtaggcgacccccctggcgaggaacttccgcctctcggaggccccggccgcgtcggcggcggcgccctcgagcgcgcccacgctagccgtagatgctcggtgcacggccttgttggtgtgcaactcgacctcaacggccggtgcgctacgcccgtcaaggatctggcgcgcccgcaccctcgtgatcacggtgggcgcctcccgcctcatgtggccgacgatgaaaagcgccgggttaggggccttggcgcgcaccgccgtattcagggcctcctcgctcttgcgcgagagcaggtgcttccccaggtactcctgcactgacaaggctgccacagcggtggaatttgtcctcacgacttcgccacgtcgtcctcacctccctggcttcccacgactccgccgtatcgaggtgctcggtgggtcgtcttaatccgaagtccgaactaggaagacgagacagagaggtctgaggaatgggcctcgtttgatgttgagctgaattatttttccagcataagcccaggtcttggtccatgaacaaaattactagaaacccagcccagtactacgatctaaaagagggactgccactggatagctctctctagcattctccacgctccaatacagcggcgtcgtgtctatccgggtctatccgcgaacacgtgagaactctccagaaactgctttctcctccacttcatctctctcgctttccctctataaaaagaccccttctaggaattgagggagacagcaagcaccaagcagcgatccgaagctcaatcaattcactcaaacctcttccccaaatcttcgattagatcttcgttgacaagaagactagaaccgaacctgacatgtccaacctgctcacggttcaccagaaccttccggctcttccagtggacgcgacgtccgatgaagtcaggaagaacctcatggacatgttccgcgacaggcaagcgttcagcgagcacacctggaagatgctgctctccgtctgccgctcctgggctgcatggtgcaagctgaacaacaggaagtggttccccgctgagcccgaggacgtgagggattaccttctgtacctgcaagcgcgaggtttgtttctgcttctacctttgatatatatataataattatcattaattagtagtaatataatatttcaaatatttttttcaaaataaaagaatgtagtatatagcaattgcttttctgtagtttataagtgtgtatattttaatttataacttttctaatatatgaccaaaacatggtgatgcctaggtctggcagtgaagaccatccagcaacaccttggacaactgaacatgcttcacaggcgctccggcctcccgcgccccagcgactcgaacgccgtgagcctcgtcatgcgccgcatcaggaaggaaaacgtcgatgccggcgaaagggcaaagcaggccctcgcgttcgagaggaccgatttcgaccaggtccgcagcctgatggagaacagcgacaggtgccaggacattaggaacctggcgttcctcggaattgcatacaacacgctcctcaggatcgcggaaattgcccgcattcgcgtgaaggacattagccgcaccgacggcggcaggatgcttatccacattggcaggaccaagacgctcgtttccaccgcaggcgtcgaaaaggccctcagcctcggagtgaccaagctcgtcgaacgctggatctccgtgtccggcgtcgcggacgacccaaacaactacctcttctgccgcgtccgcaagaacggggtggctgcccctagcgccaccagccaactcagcacgagggccttggaaggtattttcgaggccacccaccgcctgatctacggcgcgaaggatgacagcggtcaacgctacctcgcatggtccgggcactccgcccgcgttggagctgctagggacatggcccgcgccggtgtttccatccccgaaatcatgcaggcgggtggatggacgaacgtgaacattgtcatgaactacattcgcaaccttgacagcgagacgggcgcaatggttcgcctcctggaagatggtgactgaggtacccaacctagacttgtccatcttctggattggccaacttaattaatgtatgaaataaaaggatgcacacatagtgacatgctaatcactataatgtgggcatcaaagttgtgtgttatgtgtaattactagttatctgaataaaagagaaagagatcatccatatttcttatcctaaatgaatgtcacgtgtctttataattctttgatgaaccagatgcatttcattaaccaaatccatatacatataaatattaatcatatataattaatatcaattgggttagcaaaacaaatctagtctaggtgtgttttgcgatccgataatcgatgggtctaaaaacggcccctaactaacgcttagttgcccgctagattagtcccccgttagtgcctagttagacacacgacgaactaggggctagcacgcgttagataacttcgtatagcatacattatacgaagttattccggaccgggttaccgaattcaattcctgcccttaaggccaattgttcaagattcattcaacaattgaaacatctcccatgattaaatcagtataaggttgctatggtcttgcttgacaaagtttttttttgagggaatttcaactaaatttttgagtgaaactatcaaatactgattttaaaaaatttttataaaaggaagcgcagagataaaaggccatctatgctacaaaagtacccaaaaatgtaatcctaaagtatgaattgcattttttttttgtttggacgaaaggaaaggagtattaccacaagaatgatatcatcttcatatttagatcttttttgggtaaagcttgagattctctaaatatagagaaatcagaagaaaaaaaaaccgtgttttggtggttttgatttctagcctccacaataactttgacggcgtcgacaagtctaacggacaccaagcagcgaaccaccagcgccgagccaagcgaagcagacggccgagacgttgacaccttcggcgcggcatctctcgagagttccgctccggcgctccacctccaccgctggcggtttcttattccgttccgttccgcctcctgctctgctcctctccacaccacacggcacgaaaccgttacggcaccggcagcacccagcacgggagaggggattcctttcccaccgttccttccctttccgccccgccgctataaatagccagccccatccccagcttttttccccaatctcatctcctctctcctgttgttcggagcacacgcacaatccgatcgatccccaaatccccttcgtctctcctcgcgagcctcgtggatcccagcttcaaggtacggcgatcgatcatcccccctccttctctctaccttcttttctctagactacatcggatggcgatccatggttagggcctgctagtttcccttcctgttttgtcgatggctgcgaggcacaatagatctgatggcgttatgacggctaacttgtcatgttgttgcgatttatagtccctttaggagatcagtttaatttctcggatggttcgagatcggtggtccatggttagtaccctaagatccgcgctgttagggttcgtagatggaggcgacctgttctgattgttaacttgtcagtacctgggaaatcctgggatggttctagctcgtccgcagatgagatcgatttcatgatcctctgtatcttgtttcgttgcctaggttccgtctaatctatccgtggtatgatgtagatgttttgatcgtgctaactacgtcttgtaaagttaattgtcaggtcataatttttagcatgcctttttttttgtttggttttgtctaattgggctgtcgttctagatcagagtagaagactgttccaaactacctgctggatttattgaacttggatctgtatgtgtgtcacatatcttcataaattcatgattaagatggattgaaatatcttttatctttttggtatggatagttctatatgttggtgtggctttgttagatgtatacatgcttagatacatgaagcaacgtgctgctactgtttagtaattgctgttcatttgtctaataaacagataaggatatgtatttatgttgctgttggttttgctggtactttgttggatacaaatgcttcaatacagaaaacagcatgctgctacgatttaccatttatctaatcttatcatatgtctaatctaataaacaaacatgcttttaaattatcttcatatgcttggatgatggcatacacagcggctatgtgtggttttttaaatacccagcatcatgggcatgcatgacactgctttaatatgctttttatttgcttgagactgtttcttttgtttatactgaccctttagttcggtgactcttctgcaggtcgactttaacttagcctaggatccatggcccagtccaagcacggcctgaccaaggagatgaccatgaagtaccgcatggagggctgcgtggacggccacaagttcgtgatcaccggcgagggcatcggctaccccttcaagggcaagcaggccatcaacctgtgcgtggtggagggcggccccttgcccttcgccgaggacatcttgtccgccgccttcatgtacggcaaccgcgtgttcaccgagtacccccaggacatcgtcgactacttcaagaactcctgccccgccggctacacctgggaccgctccttcctgttcgaggacggcgccgtgtgcatctgcaacgccgacatcaccgtgagcgtggaggagaactgcatgtaccacgagtccaagttctacggcgtgaacttccccgccgacggccccgtgatgaagaagatgaccgacaactgggagccctcctgcgagaagatcatccccgtgcccaagcagggcatcttgaagggcgacgtgagcatgtacctgctgctgaaggacggtggccgcttgcgctgccagttcgacaccgtgtacaaggccaagtccgtgccccgcaagatgcccgactggcacttcatccagcacaagctgacccgcgaggaccgcagcgacgccaagaaccagaagtggcacctgaccgagcacgccatcgcctccggctccgccttgccctccggactcagatctcgatagggtaccaatggccagttaacagatccagctgctgctgttctagggttcacaagtctgcctatttgtcttccccaatggagctatggttgtctggtctggtccttggtcgtgtcccgtttcattgtgtactatttacctgtaatgtgtatccttaagtctggtttgatggtgtctgaaacgttttgctgtggtagagcagcatggaagaactataatgaataagtgatccctaatcattgtgtccaaattttgcttctgctatacccttttgtgctgtttcttatgttttgcttaaaaatttgatctgacaaacaaatttgtctaaattatgctcttgttctgactgtgtactgtacacatttgtattgctaccggtttggcacatagttttctctttgattgcagatcaaacccttctgattgcagattgcttggctatggctgatgtgctcactgttcttctttagcttgtatattgctgatggtggcttggctacggctgaaaaagttgctgctgcgccgacttggcaactgttgctccagtaatgctttgtcctctcttcctagccgccgacttggcacttggcagctgttgctcctgtaatgcgttgttatctcttatctcttgagatgtactatgattttgaggctgtttgacttgtgccagattgccagtgctgatgctatattatctcaggtttttatgctagtatatgttttactgtgtgctgcctgtgtcgagttacgtaatctattgaaccgctatgcgtgttgatgccctgttgttgcttgccagattgatgcccctgttgcttgcagcttgcaagctgtagtgaaatcctaaaattcgaaaccaaatctattctgaacttttgaagatctgtgatgtccggaagaaaagattcaaacagataaacgggactctccagaatctataaaataaatgatcgacaaacgctttgctttggtaggcttcctagttagttagcggaccgaagcttcggtccgggcctagaaggccagcttcggccgcccctcggtaccctgggatctgcccttactttaacgcctctaaccaacacccctttatctttataaggaacaataaacagaatttgccccactgttctaaatcacctaataatatccccagctaaaaacaataaaggtttcctagaattaagacaagcatgactgttcctccaggagggtttggaacattgttgcagtcttgcagatacgggcgaagggtgagaaacagagcggagggctggaggtgacctcggtagtcgacgccggagttgagcttgacaacgacggggcggcccctgatggacttgaggaagtccgatggcgtcttcaccgtcccgccggcgcccgaggcgggcctgtcgctgccgccgccgccgctgctcatcttgcgcgctgtgcccccggcggtgtccctgtgttgcggatcgcgggtgggccaggtggatgcgagggcgacccgtttggactccggccggagccgccggatccctggtcggtgtcagtgccgtttactctgggccccacgtgtcagtaccgtctgtagatgacaacaacccgtcgtccacagtcatgtccaaaatatcctttcttcttttttttcgattcggatatctatcttccttttttttttccaaaaatcttcttgacgcaccagcgcgcacgtttgtggtaaacgccgacacgtcggtcccacgtcgatagaccccacccaccagtgagtagcgtgtacgtattcgggggtgacggacgtgtcgccgtcgtcttgctagtcccattcccatctgagccacacatctctgaacaaaaaaaaggagggaggcctccacgcacatccccctccgtgccacccgccccaaaccctcgcgccgcctccgagacagccgccgcaaccatggccaccgccgccgccgcgtctaccgcgctcactggcgccactaccgctgcgcccaaggcgaggcgccgggcgcacctcctggccacccgccgcgccctcgccgcgcccatcaggtgctcagcggcgtcacccgccatgccgatggctcccccggccaccccgctccggccgtggggccccaccgagccccgcaagggtgctgacatcctcgtcgagtccctcgagcgctgcggcgtccgcgacgtcttcgcctaccccggcggcgcgtccatggagatccaccaggcactcacccgctcccccgtcatcgccaaccacctcttccgccacgagcaaggggaggcctttgccgcctccggctacgcgcgctcctcgggccgcgtcggcgtctgcatcgccacctccggccccggcgccaccaacctagtctccgcgctcgccgacgcgctgctcgattccgtccccatggtcgccatcacgggacaggtggcgcgacgcatgattggcaccgacgccttccaggagacgcccatcgtcgaggtcacccgctccatcaccaagcacaactacctggtcctcgacgtcgacgacatcccccgcgtcgtgcaggaggctttcttcctcgcctcctctggtcgaccagggccggtgcttgtcgacatccccaaggacatccagcagcagatggcggtgcctgtctgggacaagcccatgagtctgcctgggtacattgcgcgccttcccaagccccctgcgactgagttgcttgagcaggtgctgcgtcttgttggtgaatcgcggcgccctgttctttatgtgggcggtggctgcgcagcatctggtgaggagttgcgacgctttgtggagctgactggaatcccggtcacaactactcttatgggcctcggcaacttccccagcgacgacccactgtctctgcgcatgctaggtatgcatgggacggtgtatgcaaattatgcagtggataaggccgatctgttgcttgcacttggtgtgcggtttgatgatcgcgtgacagggaagattgaggcttttgcaagcagggctaagattgtgcacgttgatattgatccggctgagattggcaagaacaagcagccacatgtgtccatctgtgcagatgttaagcttgctttgcagggcatgaatgctcttcttgaaggaagcacatcaaagaagagctttgactttggctcatggaacgatgagttggatcagcagaagagggaattcccccttgggtataaaacatctaatgaggagatccagccacaatatgctattcaggttcttgatgagctgacgaaaggcgaggccatcatcggcacaggtgttgggcagcaccagatgtgggcggcacagtactacacttacaagcggccaaggcagtggttgtcttcagctggtcttggggctatgggatttggtttgccggctgctgctggtgcttctgtggcaaacccaggtgtcactgttgttgacatcgatggagatggtagctttctcatgaacgttcaggagctagctatgatccgaattgagaacctcccagtgaaggtctttgtgctaaacaaccagcacctggggatggtggtgcagttggaggacaggttctataaggccaacagagcgcacacatacttgggaaacccagagaatgaaagtgagatatatccagatttcgtgacgatcgccaaagggttcaacattccagccgtccgtgtgacaaagaagaacgaagtccgcgcagcgataaagaagatgctcgagactccagggccgtacctcttggatataatcgtcccacaccaggagcatgtgttgcctatgatccctagtggtggggctttcaaggatatgatcctggatggtgatggcaggactgtgtactgacttcgaataggtacccggggatcctctagtgccgtgggtcgtttaagctgccgctgtacctgtgtcgtctggtgccttctggtgtacctgggaggttgtcgtctatcaagtatctgtggttggtgtcatgagtcagtgagtcccaatactgttcgtgtcctgtgtgcattatacccaaaactgttatgggcaaatcatgaataagcttgatgttcgaacttaaaagtctctgctcaatatggtattatggttgtttttgttcgtctcctaatatttgcctgggatcaaattttattggctggtgttcatttgacctccatgttcttgctaggctccattttttactctacagccataatatgtttgattgtttggtttgttctttgttgtacacctggttctgtcgagcttagttttcgacactggcttacagcttaacatgttgctattttattgggttctgattgctattttattgggttctgattgctagtttttgctgaatccaaaaaccatgttatttatttaagcgatccaggttattattatgatggtggctaagtttttttttttccaagggtaaattttctggattctccagtgtttctgtggccgaattcaatcactagagtcgacctgcaaagcttcggtccgggcctagaaggcccgcgccacttacgcttgattccgatgacttcgtaggttcctagctcaagccgctcgtgtccaagcgtcacttacgattagctaatgattacggcatctaggaccgactagttcttatgtgcttctagtctccaaatgtggttgatagttattttgctctaagatcaacagtaatgaagtataaatcatcgttgtggtgtgctactcggttaattgagcattaacacacacaaacatgacgaggatggtataatctccaaaaatgtgtactttgttaggtgggaccctatagccttgattaatgtgctatgttaggcatgcctggaaacgtgtgacgcatatgttttgtgaacctgttgatattatatgtgcttttatattaccatattttattaaaatactaatatttattactagtaagatataacattctatctagcttaaaaactaaccataaatattccataataactagatttaccaaactaatatactaaatatacataataaatacaaaattaacaagacaataatcaatatttatgagcttaatatatttagacattatggttggtcgacgataatcatgctaacttttcgtaattgcttgattgaaatatgcttagaataatgcctctttgttctacatggcaaatagggaccattatggtgtaacaccctgggaaccacaaacaccccgaaatgctactaaactacacaactaaccttcatatataaaatttcgacagcatctcctttgaaaatttgcatagacgtggaagcaacagagtataaacagatctgcgtttaaacgtgcaagcgctactagacaattcagtacattaaaaacgtccgcaatgtgttattaagttgtctaagcgtcaatttgtttacaccacaatatatcctgcca

SEQ ID NO: 161 - DNA, 20888 bp, unidentified
  source 1..20888: mol_type = other DNA; note = Artificial
gtttacccgccaatatatcctgtcaaacactgcggccgcacttgaccgcggatggagccggagctgtggtgaggccatcgacgggaggtgggggagaacacagtctcagtgttctttgtgagtccgcaaggtttttagcttttctgtattaattaaggttgctgttggctgtagaatacggtcgtggaagagctgtatcggtagctactacgtaagctattatatactggaagtctggagctcgtcgatctccggtcgtcttcctccatttctcctcgtcttgctttgactgctgctaccatttgcttctgttttctgatgaagcatgccatgtcggccaccagtgtttgtgtggtttttgcagggaatggctttcaagtgctgtgattgaatggccctcgtcgtcctcggctgagctcacatggacgcgtcatgtgagtgagatatatgatcatatgatgagtggggttcgggtgagtgcgtacttgaagtaggatcccgctttcactcattcattcattggcctttaaaccgggaaattttcgcgaggagatggagggaagcaagcagggtgacgagtgcagagtgccgcgagcgctttgtcaaaaggcaccgccgtaggcaaaaaaatcaatggccctgactgactcgatggtagtactactgtagagactagagagggttgctccccatatcttcgtgtgacttttactccagcattgcatttccgtcattgagacgttaattaatagcagctttcgggacagatgactgtggccatgtttcgtcacggccgcttcgtgccagctgggggtactatagtactgtgattttgttagtaaaaactttcattaggccaccattgacgaccgggccttcgcttttgctgcgctaattaaccatttcccggcgaccgaagggaacatgaacatgccccgacacatgagggcatgaggactagtgttctccctgtcgttcgttgacttgactagtgatagtttaaacgctcttcaactggaagagcggttactaccggttcactagctagctgctaatcgagctagttaccctatgaggtgacatgaagcgctcacggttactatgacggttagcttcacgactgttggtggcagtagcgtacgacttagctatagttccggacttacctagctaataacttcgtatagcatacattatacgaagttatggttaccgccctggccgaagctttccggacttacccttaagcgatttaaatcctgaggcctgcaacactgatagtttaaactgaaggcgggaaacgacaatctgatcatgagcggagaattaagggagtcacgttatgacccccgccgatgacgcgggacaagccgttttacgtttggaactgacagaaccgcaacgattgaaggagccactcagccgcgggtttctggagtttaatgagctaagcacatacgtcagaaaccattattgcgcgttcaaaagtcgcctaaggtcactatcagctagcaaatatttcttgtcaaaaatgctccactgacgttccataaattcccctcggtatccaattagagtctcatattcactcccatggcggccaatgcgggcggcggtggagcgggaggaggcagcggcagcggcagcgtggctgcgccggcggtgtgccgccccagcggctcgcggtggacgccgacgccggagcagatcaggatgctgaaggagctctactacggctgcggcatccggtcgcccagctcggagcagatccagcgcatcaccgccatgctgcggcagcacggcaagatcgagggcaagaacgtcttctactggttccagaaccacaaggcccgcgagcgccagaagcgccgcctcaccagcctcgacgtcaacgtgcccgccgccggcgcggccgacgccaccaccagccaactcggcgtcctctcgctgtcgtcgccgccgccttcaggcgcggcgcctccctcgcccaccctcggcttctacgccgccggcaatggcggcggatcggctgtgctgctggacacgagttccgactggggcagcagcggcgctgctatggccaccgagacatgcttcctgcaggactacatgggcgtgacggacacgggcagctcgtcgcagtggccacgcttctcgtcgtcggacacgataatggcggcggccgcggcgcgggcggcgacgacgcgggcgcccgagacgctccctctcttcccgacctgcggcgacgacggcggcagcggtagcagcagctacttgccgttctggggtgccgcgtccacaactgccggcgccacttcttccgttgcgatccaacagcaacaccagctgcaggagcagtacagcttttacagcaacagcaacagcacccagctggccggcaccggcaaccaagacgtatcggcaacagcagcagcagccgccgccctggagctgagcctcagctcatggtgctccccttaccctgctgcagggagtatgtgagagcaacgcgagctgccactgctcttcactgatgtctctggaatggaaggaggaggaagtgagaacagatcattcgacaaagcagcattagtccgttgatcggtggaagaccactcgtcagtgttgagttgaatgtttgatcaataaaatacggcaatgctgtaagggttgttttttatgccattgataatacactgtactgttcagttgttgaactctatttcttagccatgccaagtgcttttcttattttgaataacattacagcaaaaagttgaaagacaaaaaaaaaaacccccgaacagagtgctttgggtcccaagcttctttagactgtgttcggcgttccccctaaatttctccccctatatctcactcacttgtcacatcagcgttctctttccccctatatctccacgctctacagcagttccacctatatcaaacctctataccccaccacaacaatattatatactttcatcttcaactaactcatgtaccttccaatttttttctactaataattatttacgtgcacagaaacttagcaaggagagagagagcgggaatttaaatgctcggcgttaggcttttagtccgctaggtggctagaccgaggttaggacgctagttcactaggggcctagtggtgttttaagacgtcacggtcaccgcggccgcatcgagcagctggcttgtggggaccagacaaaaaaggaatggtgcagaattgttaggcgcacctaccaaaagcatctttgcctttattgcaaagataaagcagattcctctagtacaagtggggaacaaaataacgtggaaaagagctgtcctgacagcccactcactaatgcgtatgacgaacgcagtgacgaccacaaaactcgagcaacgagatcatgagccaatcaaagaggagtgatgtagacctaaagcaataatggagccatgacgtaagggcttacgcccatacgaaataattaaaggctgatgtgacctgtcggtctctcagaacctttactttttatgtttggcgtgtatttttaaatttccacggcaatgacgatgtgaccgtcgacccactaaaacattgctttgtcaaaagctaaaaaagatgatgcccgacagccacttgtgtgaagcatgagaagccggtccctccactaagaaaattagtgaagcatcttccagtggtccctccactcacagctcaatcagtgagcaacaggacgaaggaaatgacgtaagccatgacgtctaatcccattcgaaacgcgtggaccgaagcttgcatgcctgcagtgcagcgtgacccggtcgtgcccctctctagagataatgagcattgcatgtctaagttataaaaaattaccacatattttttttgtcacacttgtttgaagtgcagtttatctatctttatacatatatttaaactttactctacgaataatataatctatagtactacaataatatcagtgttttagagaatcatataaatgaacagttagacatggtctaaaggacaattgagtattttgacaacaggactctacagttttatctttttagtgtgcatgtgttctcctttttttttgcaaatagcttcacctatataatacttcatccattttattagtacatccatttagggtttagggttaatggtttttatagactaatttttttagtacatctattttattctattttagcctctaaattaagaaaactaaaactctattttagtttttttatttaataatttagatataaaatagaataaaataaagtgactaaaaattaaacaaataccctttaagaaattaaaaaaactaaggaaacatttttcttgtttcgagtagataatgccagcctgttaaacgccgtcgacgagtctaacggacaccaaccagcgaaccagcagcgtcgcgtcgggccaagcgaagcagacggcacggcatctctgtcgctgcctctggacccctctcgagagttccgctccaccgttggacttgctccgctgtcggcatccagaaattgcgtggcggagcggcagacgtgagccggcacggcaggcggcctcctcctcctctcacggcaccggcagctacgggggattcctttcccaccgctccttcgctttcccttcctcgcccgccgtaataaatagacaccccctccacaccctctttccccaacctcgtgttgttcggagcgcacacacacacaaccagatctcccccaaatccacccgtcggcacctccgcttcaaggtacgccgctcgtcctcccccccccccctctctaccttctctagatcggcgttccggtccatgcatggttagggcccggtagttctacttctgttcatgtttgtgttagatccgtgtttgtgttagatccgtgctgctagcgttcgtacacggatgcgacctgtacgtcagacacgttctgattgctaacttgccagtgtttctctttggggaatcctgggatggctctagccgttccgcagacgggatcgatttcatgattttttttgtttcgttgcatagggtttggtttgcccttttcctttatttcaatatatgccgtgcacttgtttgtcgggtcatcttttcatgcttttttttgtcttggttgtgatgatgtggtctggttgggcggtcgttctagatcggagtagaattctgtttcaaactacctggtggatttattaattttggatctgtatgtgtgtgccatacatattcatagttacgaattgaagatgatggatggaaatatcgatctaggataggtatacatgttgatgcgggttttactgatgcatatacagagatgctttttgttcgcttggttgtgatgatgtggtgtggttgggcggtcgttcattcgttctagatcggagtagaatactgtttcaaactacctggtgtatttattaattttggaactgtatgtgtgtgtcatacatcttcatagttacgagtttaagatggatggaaatatcgatctaggataggtatacatgttgatgtgggttttactgatgcatatacatgatggcatatgcagcatctattcatatgctctaaccttgagtacctatctattataataaacaagtatgttttataattattttgatcttgatatacttggatgatggcatatgcagcagctatatgtggatttttttagccctgccttcatacgctatttatttgcttggtactgtttcttttgtcgatgctcaccctgttgtttggtgttacttctgcaggtcgactttaacttagcctaggatccatggccactgtgaacaactggctcgctttctccctctccccgcaggagctgccgccctcccagacgacggactccacactcatctcggccgccaccgccgaccatgtctccggcgatgtctgcttcaacatcccccaagattggagcatgaggggatcagagctttcggcgctcgtcgcggagccgaagctggaggacttcctcggcggcatctccttctccgagcagcatcacaaggccaactgcaacatgatacccagcactagcagcacagtttgctacgcgagctcaggtgctagcaccggctaccatcaccagctgtaccaccagcccaccagctcagcgctccacttcgcggactccgtaatggtggcttcctcggccggtgtccacgacggcggtgccatgctcagcgcggccgccgctaacggtgtcgctggcgctgccagtgccaacggcggcggcatcgggctgtccatgattaagaactggctgcggagccaaccggcgcccatgcagccgagggtggcggcggctgagggcgcgcaggggctctctttgtccatgaacatggcggggacgacccaaggcgctgctggcatgccacttctcgctggagagcgcgcacgggcgcccgagagtgtatcgacgtcagcacagggtggagccgtcgtcgtcacggcgccgaaggaggatagcggtggcagcggtgttgccggcgctctagtagccgtgagcacggacacgggtggcagcggcggcgcgtcggctgacaacacggcaaggaagacggtggacacgttcgggcagcgcacgtcgatttaccgtggcgtgacaaggcatagatggactgggagatatgaggcacatctttgggataacagttgcagaagggaagggcaaactcgtaagggtcgtcaagtctatttaggtggctatgataaagaggagaaagctgctagggcttatgatcttgctgctctgaagtactggggtgccacaacaacaacaaattttccagtgagtaactacgaaaaggagctcgaggacatgaagcacatgacaaggcaggagtttgtagcgtctctgagaaggaagagcagtggtttctccagaggtgcatccatttacaggggagtgactaggcatcaccaacatggaagatggcaagcacggattggacgagttgcagggaacaaggatctttacttgggcaccttcagcacccaggaggaggcagcggaggcgtacgacatcgcggcgatcaagttccgcggcctcaacgccgtcaccaacttcgacatgagccgctacgacgtgaagagcatcctggacagcagcgccctccccatcggcagcgccgccaagcgcctcaaggaggccgaggccgcagcgtccgcgcagcaccaccacgccggcgtggtgagctacgacgtcggccgcatcgcctcgcagctcggcgacggcggagccctggcggcggcgtacggcgcgcactaccacggcgccgcctggccgaccatcgcgttccagccgggcgccgccagcacaggcctgtaccacccgtacgcgcagcagccaatgcgcggcggcgggtggtgcaagcaggagcaggaccacgcggtgatcgcggccgcgcacagcctgcaggacctccaccacctgaacctgggcgcggccggcgcgcacgactttttctcggcagggcagcaggccgccgccgctgcgatgcacggcctgggtagcatcgacagtgcgtcgctcgagcacagcaccggctccaactccgtcgtctacaacggcggggtcggcgacagcaacggcgccagcgccgtcggcggcagtggcggtggctacatgatgccgatgagcgctgccggagcaaccactacatcggcaatggtgagccacgagcaggtgcatgcacgggcctacgacgaagccaagcaggctgctcagatggggtacgagagctacctggtgaacgcggagaacaatggtggcggaaggatgtctgcatgggggactgtcgtgtctgcagccgcggcggcagcagcaagcagcaacgacaacatggccgccgacgtcgggcatggcggcgcgcagctcttcagtgtctggaacgacacttaagcgtacctagtggtacctgacatcttatagtctgcaacctctcgtgtctgaattcctatctttatcaagtgttattgcttccacgactataggacagctttcgtcgaaagcttttgctcatgtgatctcgaaggattcatctagtctgatttttcgtgacttgtatcggttttattggattcatccaacatatatcaataaaaaatgagttgtgtttcctttcttcctagttcagttaaaattatttccctcctgcgcttgtgctgtaattgtctgtgtacctgttgtttgtgactgtgttagttcccttggatatgatttcgtatttgatatgtacatggagatagcttagcttcattattggagtatgaagttagtatgacatagtcactctcctggaaaattgacactgcaaaccatatttttattctgaaccacaaatcctagtcagtccgctggcatatgccgtccgtttgctgaatccagaacgtgggtttggagatgtacggctgagatgcctctatgcgaaggggatttcgtggtgaaacgagatgggagtagagcaacgcccgtggaagatgcttcaaacttccacacttttgagcaacgatcggcagtagtaaggtagacgatttcaagatcaaagcatatgaagataaacaacatcaacaacaaaatttgttggggttctatagagagaaacagagctacatacatacactgttttgtatctaccatctgagatgatgaaaagatgaaaaactaaagaatgccccggcgccaacgccaggacacgccgcgcgcgcgtcacccgagccatctcttgacccagccggcgctgtatatttacacacgttgcagcatcgatcaccacctgttcgatcgcgtcgccgtcaccggcgcgccgcgacttattgaactagtctagggcgcggctaacaacctagcttagattgccttgtctaaacccttaggctaacgcgccactctagaaggccgatctccccgggtttaccgagctcaaacagctgaaacgtgtagcccattattgtacctacaaggctctttgggcccctcgattttaggcccagactacgctgccagtccaccgtactctactctgttttttttttccttcttttttgggtctagaggttcacaaactcaatacaacacacagtggagtagggtattacgctccggcggcccgaaccactctaaatccttgtgtcctcgtgtgctcttccaccattaatgactgtaattgcagggacacgaagagttgtagcgcttttgccaacaagatccgctatatgctagtagagtggaacctgcacagcaacaagcatccaataatctgagaataagaattatgtgtggtgatggttctcatctctgcaactcgccattttcgcgagagaaccaaatccaagttggtgaagatcatgatttgggctcatgggctggcatagtagctattacctttgcaattgtggttcgaatctatccgatattctccttttcagggagagctaatgcttatgcttattgggtattttggtttgacactgcttcacgcccaaaaaaaggcaactatgtctgagttggatatggcccaaaaaaaggcagctatgtctgagttggatatggaagtcttctttcgtttagggtgaagtaagaccaagctcatgagcttattatcttaggtcggaacaaattagttgataggcatggcacatttatcaaattataatgattttaacagaaaagcaacacctctttttcagcagcaccagctttgcaagctgcaattgacactccaagcatagtatttgctccaaactcagcctgcatttcgcacaatatcatatctatttccatttggataaaatatattttccagaaatatgggaacagaatcaagatacagaaaaaagttgtggtagtagtggtaagtggaaacacaagtacagtgaaaagatagcattatttctgaacagtcaaattaaccgaaataagtagtatcacatactgcccctaaattgactacacccaatgtaaagaattgcttgagcatattgagccatcagttgtttgtttgtgtaacggatttgacaatgcagagttcaggagcaaaaaaccgcaaaggagagaaagagggaaaggatctcctagtatcccaccttgtggcgcgccctgtcaagtgcatgatggcctggtcgatctgcgtctgctgctgcggttccatcccaacgagtgcctccgacaccttgtcgttgatcacccgcaccgcgtaggcgacccccctggcgaggaacttccgcctctcggaggccccggccgcgtcggcggcggcgccctcgagcgcgcccacgctagccgtagatgctcggtgcacggccttgttggtgtgcaactcgacctcaacggccggtgcgctacgcccgtcaaggatctggcgcgcccgcaccctcgtgatcacggtgggcgcctcccgcctcatgtggccgacgatgaaaagcgccgggttaggggccttggcgcgcaccgccgtattcagggcctcctcgctcttgcgcgagagcaggtgcttccccaggtactcctgcactgacaaggctgccacagcggtggaatttgtcctcacgacttcgccacgtcgtcctcacctccctggcttcccacgactccgccgtatcgaggtgctcggtgggtcgtcttaatccgaagtccgaactaggaagacgagacagagaggtctgaggaatgggcctcgtttgatgttgagctgaattatttttccagcataagcccaggtcttggtccatgaacaaaattactagaaacccagcccagtactacgatctaaaagagggactgccactggatagctctctctagcattctccacgctccaatacagcggcgtcgtgtctatccgggtctatccgcgaacacgtgagaactctccagaaactgctttctcctccacttcatctctctcgctttccctctataaaaagaccccttctaggaattgagggagacagcaagcaccaagcagcgatccgaagctcaatcaattcactcaaacctcttccccaaatcttcgattagatcttcgttgacaagaagactagaaccgaacctgacatgtccaacctgctcacggttcaccagaaccttccggctcttccagtggacgcgacgtccgatgaagtcaggaagaacctcatggacatgttccgcgacaggcaagcgttcagcgagcacacctggaagatgctgctctccgtctgccgctcctgggctgcatggtgcaagctgaacaacaggaagtggttccccgctgagcccgaggacgtgagggattaccttctgtacctgcaagcgcgaggtttgtttctgcttctacctttgatatatatataataattatcattaattagtagtaatataatatttcaaatatttttttcaaaataaaagaatgtagtatatagcaattgcttttctgtagtttataagtgtgtatattttaatttataacttttctaatatatgaccaaaacatggtgatgcctaggtctggcagtgaagaccatccagcaacaccttggacaactgaacatgcttcacaggcgctccggcctcccgcgccccagcgactcgaacgccgtgagcctcgtcatgcgccgcatcaggaaggaaaacgtcgatgccggcgaaagggcaaagcaggccctcgcgttcgagaggaccgatttcgaccaggtccgcagcctgatggagaacagcgacaggtgccaggacattaggaacctggcgttcctcggaattgcatacaacacgctcctcaggatcgcggaaattgcccgcattcgcgtgaaggacattagccgcaccgacggcggcaggatgcttatccacattggcaggaccaagacgctcgtttccaccgcaggcgtcgaaaaggccctcagcctcggagtgaccaagctcgtcgaacgctggatctccgtgtccggcgtcgcggacgacccaaacaactacctcttctgccgcgtccgcaagaacggggtggctgcccctagcgccaccagccaactcagcacgagggccttggaaggtattttcgaggccacccaccgcctgatctacggcgcgaaggatgacagcggtcaacgctacctcgcatggtccgggcactccgcccgcgttggagctgctagggacatggcccgcgccggtgtttccatccccgaaatcatgcaggcgggtggatggacgaacgtgaacattgtcatgaactacattcgcaaccttgacagcgagacgggcgcaatggttcgcctcctggaagatggtgactgaggtacccaacctagacttgtccatcttctggattggccaacttaattaatgtatgaaataaaaggatgcacacatagtgacatgctaatcactataatgtgggcatcaaagttgtgtgttatgtgtaattactagttatctgaataaaagagaaagagatcatccatatttcttatcctaaatgaatgtcacgtgtctttataattctttgatgaaccagatgcatttcattaaccaaatccatatacatataaatattaatcatatataattaatatcaattgggttagcaaaacaaatctagtctaggtgtgttttgcgatccgataatcgatgggtctaaaaacggcccctaactaacgcttagttgcccgctagattagtcccccgttagtgcctagttagacacacgacgaactaggggctagcacgcgttagataacttcgtatagcatacattatacgaagttattccggaccgggttaccgaattcaattcctgcccttaaggccaattgttcaagattcattcaacaattgaaacatctcccatgattaaatcagtataaggttgctatggtcttgcttgacaaagtttttttttgagggaatttcaactaaatttttgagtgaaactatcaaatactgattttaaaaaatttttataaaaggaagcgcagagataaaaggccatctatgctacaaaagtacccaaaaatgtaatcctaaagtatgaattgcattttttttttgtttggacgaaaggaaaggagtattaccacaagaatgatatcatcttcatatttagatcttttttgggtaaagcttgagattctctaaatatagagaaatcagaagaaaaaaaaaccgtgttttggtggttttgatttctagcctccacaataactttgacggcgtcgacaagtctaacggacaccaagcagcgaaccaccagcgccgagccaagcgaagcagacggccgagacgttgacaccttcggcgcggcatctctcgagagttccgctccggcgctccacctccaccgctggcggtttcttattccgttccgttccgcctcctgctctgctcctctccacaccacacggcacgaaaccgttacggcaccggcagcacccagcacgggagaggggattcctttcccaccgttccttccctttccgccccgccgctataaatagccagccccatccccagcttttttccccaatctcatctcctctctcctgttgttcggagcacacgcacaatccgatcgatccccaaatccccttcgtctctcctcgcgagcctcgtggatcccagcttcaaggtacggcgatcgatcatcccccctccttctctctaccttcttttctctagactacatcggatggcgatccatggttagggcctgctagtttcccttcctgttttgtcgatggctgcgaggcacaatagatctgatggcgttatgacggctaacttgtcatgttgttgcgatttatagtccctttaggagatcagtttaatttctcggatggttcgagatcggtggtccatggttagtaccctaagatccgcgctgttagggttcgtagatggaggcgacctgttctgattgttaacttgtcagtacctgggaaatcctgggatggttctagctcgtccgcagatgagatcgatttcatgatcctctgtatcttgtttcgttgcctaggttccgtctaatctatccgtggtatgatgtagatgttttgatcgtgctaactacgtcttgtaaagttaattgtcaggtcataatttttagcatgcctttttttttgtttggttttgtctaattgggctgtcgttctagatcagagtagaagactgttccaaactacctgctggatttattgaacttggatctgtatgtgtgtcacatatcttcataaattcatgattaagatggattgaaatatcttttatctttttggtatggatagttctatatgttggtgtggctttgttagatgtatacatgcttagatacatgaagcaacgtgctgctactgtttagtaattgctgttcatttgtctaataaacagataaggatatgtatttatgttgctgttggttttgctggtactttgttggatacaaatgcttcaatacagaaaacagcatgctgctacgatttaccatttatctaatcttatcatatgtctaatctaataaacaaacatgcttttaaattatcttcatatgcttggatgatggcatacacagcggctatgtgtggttttttaaatacccagcatcatgggcatgcatgacactgctttaatatgctttttatttgcttgagactgtttcttttgtttatactgaccctttagttcggtgactcttctgcaggtcgactttaacttagcctaggatccatggcccagtccaagcacggcctgaccaaggagatgaccatgaagtaccgcatggagggctgcgtggacggccacaagttcgtgatcaccggcgagggcatcggctaccccttcaagggcaagcaggccatcaacctgtgcgtggtggagggcggccccttgcccttcgccgaggacatcttgtccgccgccttcatgtacggcaaccgcgtgttcaccgagtacccccaggacatcgtcgactacttcaagaactcctgccccgccggctacacctgggaccgctccttcctgttcgaggacggcgccgtgtgcatctgcaacgccgacatcaccgtgagcgtggaggagaactgcatgtaccacgagtccaagttctacggcgtgaacttccccgccgacggccccgtgatgaagaagatgaccgacaactgggagccctcctgcgagaagatcatccccgtgcccaagcagggcatcttgaagggcgacgtgagcatgtacctgctgctgaaggacggtggccgcttgcgctgccagttcgacaccgtgtacaaggccaagtccgtgccccgcaagatgcccgactggcacttcatccagcacaagctgacccgcgaggaccgcagcgacgccaagaaccagaagtggcacctgaccgagcacgccatcgcctccggctccgccttgccctccggactcagatctcgatagggtaccaatggccagttaacagatccagctgctgctgttctagggttcacaagtctgcctatttgtcttccccaatggagctatggttgtctggtctggtccttggtcgtgtcccgtttcattgtgtactatttacctgtaatgtgtatccttaagtctggtttgatggtgtctgaaacgttttgctgtggtagagcagcatggaagaactataatgaataagtgatccctaatcattgtgtccaaattttgcttctgctatacccttttgtgctgtttcttatgttttgcttaaaaatttgatctgacaaacaaatttgtctaaattatgctcttgttctgactgtgtactgtacacatttgtattgctaccggtttggcacatagttttctctttgattgcagatcaaacccttctgattgcagattgcttggctatggctgatgtgctcactgttcttctttagcttgtatattgctgatggtggcttggctacggctgaaaaagttgctgctgcgccgacttggcaactgttgctccagtaatgctttgtcctctcttcctagccgccgacttggcacttggcagctgttgctcctgtaatgcgttgttatctcttatctcttgagatgtactatgattttgaggctgtttgacttgtgccagattgccagtgctgatgctatattatctcaggtttttatgctagtatatgttttactgtgtgctgcctgtgtcgagttacgtaatctattgaaccgctatgcgtgttgatgccctgttgttgcttgccagattgatgcccctgttgcttgcagcttgcaagctgtagtgaaatcctaaaattcgaaaccaaatctattctgaacttttgaagatctgtgatgtccggaagaaaagattcaaacagataaacgggactctccagaatctataaaataaatgatcgacaaacgctttgctttggtaggcttcctagttagttagcggaccgaagcttcggtccgggcctagaaggccagcttcggccgcccctcggtaccctgggatctgcccttactttaacgcctctaaccaacacccctttatctttataaggaacaataaacagaatttgccccactgttctaaatcacctaataatatccccagctaaaaacaataaaggtttcctagaattaagacaagcatgactgttcctccaggagggtttggaacattgttgcagtcttgcagatacgggcgaagggtgagaaacagagcggagggctggaggtgacctcggtagtcgacgccggagttgagcttgacaacgacggggcggcccctgatggacttgaggaagtccgatggcgtcttcaccgtcccgccggcgcccgaggcgggcctgtcgctgccgccgccgccgctgctcatcttgcgcgctgtgcccccggcggtgtccctgtgttgcggatcgcgggtgggccaggtggatgcgagggcgacccgtttggactccggccggagccgccggatccctggtcggtgtcagtgccgtttactctgggccccacgtgtcagtaccgtctgtagatgacaacaacccgtcgtccacagtcatgtccaaaatatcctttcttcttttttttcgattcggatatctatcttccttttttttttccaaaaatcttcttgacgcaccagcgcgcacgtttgtggtaaacgccgacacgtcggtcccacgtcgatagaccccacccaccagtgagtagcgtgtacgtattcgggggtgacggacgtgtcgccgtcgtcttgctagtcccattcccatctgagccacacatctctgaacaaaaaaaaggagggaggcctccacgcacatccccctccgtgccacccgccccaaaccctcgcgccgcctccgagacagccgccgcaaccatggccaccgccgccgccgcgtctaccgcgctcactggcgccactaccgctgcgcccaaggcgaggcgccgggcgcacctcctggccacccgccgcgccctcgccgcgcccatcaggtgctcagcggcgtcacccgccatgccgatggctcccccggccaccccgctccggccgtggggccccaccgagccccgcaagggtgctgacatcctcgtcgagtccctcgagcgctgcggcgtccgcgacgtcttcgcctaccccggcggcgcgtccatggagatccaccaggcactcacccgctcccccgtcatcgccaaccacctcttccgccacgagcaaggggaggcctttgccgcctccggctacgcgcgctcctcgggccgcgtcggcgtctgcatcgccacctccggccccggcgccaccaacctagtctccgcgctcgccgacgcgctgctcgattccgtccccatggtcgccatcacgggacaggtggcgcgacgcatgattggcaccgacgccttccaggagacgcccatcgtcgaggtcacccgctccatcaccaagcacaactacctggtcctcgacgtcgacgacatcccccgcgtcgtgcaggaggctttcttcctcgcctcctctggtcgaccagggccggtgcttgtcgacatccccaaggacatccagcagcagatggcggtgcctgtctgggacaagcccatgagtctgcctgggtacattgcgcgccttcccaagccccctgcgactgagttgcttgagcaggtgctgcgtcttgttggtgaatcgcggcgccctgttctttatgtgggcggtggctgcgcagcatctggtgaggagttgcgacgctttgtggagctgactggaatcccggtcacaactactcttatgggcctcggcaacttccccagcgacgacccactgtctctgcgcatgctaggtatgcatgggacggtgtatgcaaattatgcagtggataaggccgatctgttgcttgcacttggtgtgcggtttgatgatcgcgtgacagggaagattgaggcttttgcaagcagggctaagattgtgcacgttgatattgatccggctgagattggcaagaacaagcagccacatgtgtccatctgtgcagatgttaagcttgctttgcagggcatgaatgctcttcttgaaggaagcacatcaaagaagagctttgactttggctcatggaacgatgagttggatcagcagaagagggaattcccccttgggtataaaacatctaatgaggagatccagccacaatatgctattcaggttcttgatgagctgacgaaaggcgaggccatcatcggcacaggtgttgggcagcaccagatgtgggcggcacagtactacacttacaagcggccaaggcagtggttgtcttcagctggtcttggggctatgggatttggtttgccggctgctgctggtgcttctgtggcaaacccaggtgtcactgttgttgacatcgatggagatggtagctttctcatgaacgttcaggagctagctatgatccgaattgagaacctcccagtgaaggtctttgtgctaaacaaccagcacctggggatggtggtgcagttggaggacaggttctataaggccaacagagcgcacacatacttgggaaacccagagaatgaaagtgagatatatccagatttcgtgacgatcgccaaagggttcaacattccagccgtccgtgtgacaaagaagaacgaagtccgcgcagcgataaagaagatgctcgagactccagggccgtacctcttggatataatcgtcccacaccaggagcatgtgttgcctatgatccctagtggtggggctttcaaggatatgatcctggatggtgatggcaggactgtgtactgacttcgaataggtacccggggatcctctagtgccgtgggtcgtttaagctgccgctgtacctgtgtcgtctggtgccttctggtgtacctgggaggttgtcgtctatcaagtatctgtggttggtgtcatgagtcagtgagtcccaatactgttcgtgtcctgtgtgcattatacccaaaactgttatgggcaaatcatgaataagcttgatgttcgaacttaaaagtctctgctcaatatggtattatggttgtttttgttcgtctcctaatatttgcctgggatcaaattttattggctggtgttcatttgacctccatgttcttgctaggctccattttttactctacagccataatatgtttgattgtttggtttgttctttgttgtacacctggttctgtcgagcttagttttcgacactggcttacagcttaacatgttgctattttattgggttctgattgctattttattgggttctgattgctagtttttgctgaatccaaaaaccatgttatttatttaagcgatccaggttattattatgatggtggctaagtttttttttttccaagggtaaattttctggattctccagtgtttctgtggccgaattcaatcactagagtcgacctgcaaagcttcggtccgggcctagaaggcccgcgccacttacgcttgattccgatgacttcgtaggttcctagctcaagccgctcgtgtccaagcgtcacttacgattagctaatgattacggcatctaggaccgactagttcttatgtgcttctagtctccaaatgtggttgatagttattttgctctaagatcaacagtaatgaagtataaatcatcgttgtggtgtgctactcggttaattgagcattaacacacacaaacatgacgaggatggtataatctccaaaaatgtgtactttgttaggtgggaccctatagccttgattaatgtgctatgttaggcatgcctggaaacgtgtgacgcatatgttttgtgaacctgttgatattatatgtgcttttatattaccatattttattaaaatactaatatttattactagtaagatataacattctatctagcttaaaaactaaccataaatattccataataactagatttaccaaactaatatactaaatatacataataaatacaaaattaacaagacaataatcaatatttatgagcttaatatatttagacattatggttggtcgacgataatcatgctaacttttcgtaattgcttgattgaaatatgcttagaataatgcctctttgttctacatggcaaatagggaccattatggtgtaacaccctgggaaccacaaacaccccgaaatgctactaaactacacaactaaccttcatatataaaatttcgacagcatctcctttgaaaatttgcatagacgtggaagcaacagagtataaacagatctgcgtttaaacgtgcaagcgctactagacaattcagtacattaaaaacgtccgcaatgtgttattaagttgtctaagcgtcaatttgtttacaccacaatatatcctgcca

SEQ ID NO: 162 - DNA, 20881 bp, unidentified
  source 1..20881: mol_type = other DNA; note = Artificial
gtttacccgccaatatatcctgtcaaacactgcggccgcacttgaccgcggatggagccggagctgtggtgaggccatcgacgggaggtgggggagaacacagtctcagtgttctttgtgagtccgcaaggtttttagcttttctgtattaattaaggttgctgttggctgtagaatacggtcgtggaagagctgtatcggtagctactacgtaagctattatatactggaagtctggagctcgtcgatctccggtcgtcttcctccatttctcctcgtcttgctttgactgctgctaccatttgcttctgttttctgatgaagcatgccatgtcggccaccagtgtttgtgtggtttttgcagggaatggctttcaagtgctgtgattgaatggccctcgtcgtcctcggctgagctcacatggacgcgtcatgtgagtgagatatatgatcatatgatgagtggggttcgggtgagtgcgtacttgaagtaggatcccgctttcactcattcattcattggcctttaaaccgggaaattttcgcgaggagatggagggaagcaagcagggtgacgagtgcagagtgccgcgagcgctttgtcaaaaggcaccgccgtaggcaaaaaaatcaatggccctgactgactcgatggtagtactactgtagagactagagagggttgctccccatatcttcgtgtgacttttactccagcattgcatttccgtcattgagacgttaattaatagcagctttcgggacagatgactgtggccatgtttcgtcacggccgcttcgtgccagctgggggtactatagtactgtgattttgttagtaaaaactttcattaggccaccattgacgaccgggccttcgcttttgctgcgctaattaaccatttcccggcgaccgaagggaacatgaacatgccccgacacatgagggcatgaggactagtgttctccctgtcgttcgttgacttgactagtgatagtttaaacgctcttcaactggaagagcggttactaccggttcactagctagctgctaatcgagctagttaccctatgaggtgacatgaagcgctcacggttactatgacggttagcttcacgactgttggtggcagtagcgtacgacttagctatagttccggacttacctagctaataacttcgtatagcatacattatacgaagttatggttaccgccctggccgaagctttccggacttacccttaagcgatttaaatcctgaggcctgcaacactgatagtttaaactgaaggcgggaaacgacaatctgatcatgagcggagaattaagggagtcacgttatgacccccgccgatgacgcgggacaagccgttttacgtttggaactgacagaaccgcaacgattgaaggagccactcagccgcgggtttctggagtttaatgagctaagcacatacgtcagaaaccattattgcgcgttcaaaagtcgcctaaggtcactatcagctagcaaatatttcttgtcaaaaatgctccactgacgttccataaattcccctcggtatccaattagagtctcatattcactcccatggcggccaatgcgggcggcggtggagcgggaggaggcagcggcagcggcagcgtggctgcgccggcggtgtgccgccccagcggctcgcggtggacgccgacgccggagcagatcaggatgctgaaggagctctactacggctgcggcatccggtcgcccagctcggagcagatccagcgcatcaccgccatgctgcggcagcacggcaagatcgagggcaagaacgtcttctactggttccagaaccacaaggcccgcgagcgccagaagcgccgcctcaccagcctcgacgtcaacgtgcccgccgccggcgcggccgacgccaccaccagccaactcggcgtcctctcgctgtcgtcgccgccgccttcaggcgcggcgcctccctcgcccaccctcggcttctacgccgccggcaatggcggcggatcggctgtgctgctggacacgagttccgactggggcagcagcggcgctgctatggccaccgagacatgcttcctgcaggactacatgggcgtgacggacacgggcagctcgtcgcagtggccacgcttctcgtcgtcggacacgataatggcggcggccgcggcgcgggcggcgacgacgcgggcgcccgagacgctccctctcttcccgacctgcggcgacgacggcggcagcggtagcagcagctacttgccgttctggggtgccgcgtccacaactgccggcgccacttcttccgttgcgatccaacagcaacaccagctgcaggagcagtacagcttttacagcaacagcaacagcacccagctggccggcaccggcaaccaagacgtatcggcaacagcagcagcagccgccgccctggagctgagcctcagctcatggtgctccccttaccctgctgcagggagtatgtgagagcaacgcgagctgccactgctcttcactgatgtctctggaatggaaggaggaggaagtgagaacagatcattcgacaaagcagcattagtccgttgatcggtggaagaccactcgtcagtgttgagttgaatgtttgatcaataaaatacggcaatgctgtaagggttgttttttatgccattgataatacactgtactgttcagttgttgaactctatttcttagccatgccaagtgcttttcttattttgaataacattacagcaaaaagttgaaagacaaaaaaaaaaacccccgaacagagtgctttgggtcccaagcttctttagactgtgttcggcgttccccctaaatttctccccctatatctcactcacttgtcacatcagcgttctctttccccctatatctccacgctctacagcagttccacctatatcaaacctctataccccaccacaacaatattatatactttcatcttcaactaactcatgtaccttccaatttttttctactaataattatttacgtgcacagaaacttagcaaggagagagagagcgggaatttaaatgctcggcgttaggcttttagtccgctaggtggctagaccgaggttaggacgctagttcactaggggcctagtggtgttttaagacgtcacggtcaccgcggccgcatcgagcagctggcttgtggggaccagacaaaaaaggaatggtgcagaattgttaggcgcacctaccaaaagcatctttgcctttattgcaaagataaagcagattcctctagtacaagtggggaacaaaataacgtggaaaagagctgtcctgacagcccactcactaatgcgtatgacgaacgcagtgacgaccacaaaactcgagcaacgagatcatgagccaatcaaagaggagtgatgtagacctaaagcaataatggagccatgacgtaagggcttacgcccatacgaaataattaaaggctgatgtgacctgtcggtctctcagaacctttactttttatgtttggcgtgtatttttaaatttccacggcaatgacgatgtgaccgtcgacccactaaaacattgctttgtcaaaagctaaaaaagatgatgcccgacagccacttgtgtgaagcatgagaagccggtccctccactaagaaaattagtgaagcatcttccagtggtccctccactcacagctcaatcagtgagcaacaggacgaaggaaatgacgtaagccatgacgtctaatcccattcgaaacgcgtggaccgaagcttgcatgcctgcagtgcagcgtgacccggtcgtgcccctctctagagataatgagcattgcatgtctaagttataaaaaattaccacatattttttttgtcacacttgtttgaagtgcagtttatctatctttatacatatatttaaactttactctacgaataatataatctatagtactacaataatatcagtgttttagagaatcatataaatgaacagttagacatggtctaaaggacaattgagtattttgacaacaggactctacagttttatctttttagtgtgcatgtgttctcctttttttttgcaaatagcttcacctatataatacttcatccattttattagtacatccatttagggtttagggttaatggtttttatagactaatttttttagtacatctattttattctattttagcctctaaattaagaaaactaaaactctattttagtttttttatttaataatttagatataaaatagaataaaataaagtgactaaaaattaaacaaataccctttaagaaattaaaaaaactaaggaaacatttttcttgtttcgagtagataatgccagcctgttaaacgccgtcgacgagtctaacggacaccaaccagcgaaccagcagcgtcgcgtcgggccaagcgaagcagacggcacggcatctctgtcgctgcctctggacccctctcgagagttccgctccaccgttggacttgctccgctgtcggcatccagaaattgcgtggcggagcggcagacgtgagccggcacggcaggcggcctcctcctcctctcacggcaccggcagctacgggggattcctttcccaccgctccttcgctttcccttcctcgcccgccgtaataaatagacaccccctccacaccctctttccccaacctcgtgttgttcggagcgcacacacacacaaccagatctcccccaaatccacccgtcggcacctccgcttcaaggtacgccgctcgtcctcccccccccccctctctaccttctctagatcggcgttccggtccatgcatggttagggcccggtagttctacttctgttcatgtttgtgttagatccgtgtttgtgttagatccgtgctgctagcgttcgtacacggatgcgacctgtacgtcagacacgttctgattgctaacttgccagtgtttctctttggggaatcctgggatggctctagccgttccgcagacgggatcgatttcatgattttttttgtttcgttgcatagggtttggtttgcccttttcctttatttcaatatatgccgtgcacttgtttgtcgggtcatcttttcatgcttttttttgtcttggttgtgatgatgtggtctggttgggcggtcgttctagatcggagtagaattctgtttcaaactacctggtggatttattaattttggatctgtatgtgtgtgccatacatattcatagttacgaattgaagatgatggatggaaatatcgatctaggataggtatacatgttgatgcgggttttactgatgcatatacagagatgctttttgttcgcttggttgtgatgatgtggtgtggttgggcggtcgttcattcgttctagatcggagtagaatactgtttcaaactacctggtgtatttattaattttggaactgtatgtgtgtgtcatacatcttcatagttacgagtttaagatggatggaaatatcgatctaggataggtatacatgttgatgtgggttttactgatgcatatacatgatggcatatgcagcatctattcatatgctctaaccttgagtacctatctattataataaacaagtatgttttataattattttgatcttgatatacttggatgatggcatatgcagcagctatatgtggatttttttagccctgccttcatacgctatttatttgcttggtactgtttcttttgtcgatgctcaccctgttgtttggtgttacttctgcaggtcgactttaacttagcctaggatccatggccactgtgaacaactggctcgctttctccctctccccgcaggagctgccgccctcccagacgacggactccacactcatctcggccgccaccgccgaccatgtctccggcgatgtctgcttcaacatcccccaagattggagcatgaggggatcagagctttcggcgctcgtcgcggagccgaagctggaggacttcctcggcggcatctccttctccgagcagcatcacaaggccaactgcaacatgatacccagcactagcagcacagtttgctacgcgagctcaggtgctagcaccggctaccatcaccagctgtaccaccagcccaccagctcagcgctccacttcgcggactccgtaatggtggcttcctcggccggtgtccacgacggcggtgccatgctcagcgcggccgccgctaacggtgtcgctggcgctgccagtgccaacggcggcggcatcgggctgtccatgattaagaactggctgcggagccaaccggcgcccatgcagccgagggtggcggcggctgagggcgcgcaggggctctctttgtccatgaacatggcggggacgacccaaggcgctgctggcatgccacttctcgctggagagcgcgcacgggcgcccgagagtgtatcgacgtcagcacagggtggagccgtcgtcgtcacggcgccgaaggaggatagcggtggcagcggtgttgccggcgctctagtagccgtgagcacggacacgggtggcagcggcggcgcgtcggctgacaacacggcaaggaagacggtggacacgttcgggcagcgcacgtcgatttaccgtggcgtgacaaggcatagatggactgggagatatgaggcacatctttgggataacagttgcagaagggaagggcaaactcgtaagggtcgtcaagtctatttaggtggctatgataaagaggagaaagctgctagggcttatgatcttgctgctctgaagtactggggtgccacaacaacaacaaattttccagtgagtaactacgaaaaggagctcgaggacatgaagcacatgacaaggcaggagtttgtagcgtctctgagaaggaagagcagtggtttctccagaggtgcatccatttacaggggagtgactaggcatcaccaacatggaagatggcaagcacggattggacgagttgcagggaacaaggatctttacttgggcaccttcagcacccaggaggaggcagcggaggcgtacgacatcgcggcgatcaagttccgcggcctcaacgccgtcaccaacttcgacatgagccgctacgacgtgaagagcatcctggacagcagcgccctccccatcggcagcgccgccaagcgcctcaaggaggccgaggccgcagcgtccgcgcagcaccaccacgccggcgtggtgagctacgacgtcggccgcatcgcctcgcagctcggcgacggcggagccctggcggcggcgtacggcgcgcactaccacggcgccgcctggccgaccatcgcgttccagccgggcgccgccagcacaggcctgtaccacccgtacgcgcagcagccaatgcgcggcggcgggtggtgcaagcaggagcaggaccacgcggtgatcgcggccgcgcacagcctgcaggacctccaccacctgaacctgggcgcggccggcgcgcacgactttttctcggcagggcagcaggccgccgccgctgcgatgcacggcctgggtagcatcgacagtgcgtcgctcgagcacagcaccggctccaactccgtcgtctacaacggcggggtcggcgacagcaacggcgccagcgccgtcggcggcagtggcggtggctacatgatgccgatgagcgctgccggagcaaccactacatcggcaatggtgagccacgagcaggtgcatgcacgggcctacgacgaagccaagcaggctgctcagatggggtacgagagctacctggtgaacgcggagaacaatggtggcggaaggatgtctgcatgggggactgtcgtgtctgcagccgcggcggcagcagcaagcagcaacgacaacatggccgccgacgtcgggcatggcggcgcgcagctcttcagtgtctggaacgacacttaagcgtacctagtggtacctgacatcttatagtctgcaacctctcgtgtctgaattcctatctttatcaagtgttattgcttccacgactataggacagctttcgtcgaaagcttttgctcatgtgatctcgaaggattcatctagtctgatttttcgtgacttgtatcggttttattggattcatccaacatatatcaataaaaaatgagttgtgtttcctttcttcctagttcagttaaaattatttccctcctgcgcttgtgctgtaattgtctgtgtacctgttgtttgtgactgtgttagttcccttggatatgatttcgtatttgatatgtacatggagatagcttagcttcattattggagtatgaagttagtatgacatagtcactctcctggaaaattgacactgcaaaccatatttttattctgaaccacaaatcctagtcagtccgctggcatatgccgtccgtttgctgaatccagaacgtgggtttggagatgtacggctgagatgcctctatgcgaaggggatttcgtggtgaaacgagatgggagtagagcaacgcccgtggaagatgcttcaaacttccacacttttgagcaacgatcggcagtagtaaggtagacgatttcaagatcaaagcatatgaagataaacaacatcaacaacaaaatttgttggggttctatagagagaaacagagctacatacatacactgttttgtatctaccatctgagatgatgaaaagatgaaaaactaaagaatgccccggcgccaacgccaggacacgccgcgcgcgcgtcacccgagccatctcttgacccagccggcgctgtatatttacacacgttgcagcatcgatcaccacctgttcgatcgcgtcgccgtcaccggcgcgccgcgacttattgaactagtctagggcgcggctaacaacctagcttagattgccttgtctaaacccttaggctaacgcgccactctagaaggccgatctccccgggtttaccgagctcccacgagagagatgtttggataaggtccattagaaatttacgtgggcctggaatagggcttacataaacattgggctgatcgagagtgcagatgttgagaaaaatatcctttgcgaattctagaggttcacaaactcaatacaacacacagtggagtagggtattacgctccggcggcccgaaccactctaaatccttgtgtcctcgtgtgctcttccaccattaatgactgtaattgcagggacacgaagagttgtagcgcttttgccaacaagatccgctatatgctagtagagtggaacctgcacagcaacaagcatccaataatctgagaataagaattatgtgtggtgatggttctcatctctgcaactcgccattttcgcgagagaaccaaatccaagttggtgaagatcatgatttgggctcatgggctggcatagtagctattacctttgcaattgtggttcgaatctatccgatattctccttttcagggagagctaatgcttatgcttattgggtattttggtttgacactgcttcacgcccaaaaaaaggcaactatgtctgagttggatatggcccaaaaaaaggcagctatgtctgagttggatatggaagtcttctttcgtttagggtgaagtaagaccaagctcatgagcttattatcttaggtcggaacaaattagttgataggcatggcacatttatcaaattataatgattttaacagaaaagcaacacctctttttcagcagcaccagctttgcaagctgcaattgacactccaagcatagtatttgctccaaactcagcctgcatttcgcacaatatcatatctatttccatttggataaaatatattttccagaaatatgggaacagaatcaagatacagaaaaaagttgtggtagtagtggtaagtggaaacacaagtacagtgaaaagatagcattatttctgaacagtcaaattaaccgaaataagtagtatcacatactgcccctaaattgactacacccaatgtaaagaattgcttgagcatattgagccatcagttgtttgtttgtgtaacggatttgacaatgcagagttcaggagcaaaaaaccgcaaaggagagaaagagggaaaggatctcctagtatcccaccttgtggcgcgccctgtcaagtgcatgatggcctggtcgatctgcgtctgctgctgcggttccatcccaacgagtgcctccgacaccttgtcgttgatcacccgcaccgcgtaggcgacccccctggcgaggaacttccgcctctcggaggccccggccgcgtcggcggcggcgccctcgagcgcgcccacgctagccgtagatgctcggtgcacggccttgttggtgtgcaactcgacctcaacggccggtgcgctacgcccgtcaaggatctggcgcgcccgcaccctcgtgatcacggtgggcgcctcccgcctcatgtggccgacgatgaaaagcgccgggttaggggccttggcgcgcaccgccgtattcagggcctcctcgctcttgcgcgagagcaggtgcttccccaggtactcctgcactgacaaggctgccacagcggtggaatttgtcctcacgacttcgccacgtcgtcctcacctccctggcttcccacgactccgccgtatcgaggtgctcggtgggtcgtcttaatccgaagtccgaactaggaagacgagacagagaggtctgaggaatgggcctcgtttgatgttgagctgaattatttttccagcataagcccaggtcttggtccatgaacaaaattactagaaacccagcccagtactacgatctaaaagagggactgccactggatagctctctctagcattctccacgctccaatacagcggcgtcgtgtctatccgggtctatccgcgaacacgtgagaactctccagaaactgctttctcctccacttcatctctctcgctttccctctataaaaagaccccttctaggaattgagggagacagcaagcaccaagcagcgatccgaagctcaatcaattcactcaaacctcttccccaaatcttcgattagatcttcgttgacaagaagactagaaccgaacctgacatgtccaacctgctcacggttcaccagaaccttccggctcttccagtggacgcgacgtccgatgaagtcaggaagaacctcatggacatgttccgcgacaggcaagcgttcagcgagcacacctggaagatgctgctctccgtctgccgctcctgggctgcatggtgcaagctgaacaacaggaagtggttccccgctgagcccgaggacgtgagggattaccttctgtacctgcaagcgcgaggtttgtttctgcttctacctttgatatatatataataattatcattaattagtagtaatataatatttcaaatatttttttcaaaataaaagaatgtagtatatagcaattgcttttctgtagtttataagtgtgtatattttaatttataacttttctaatatatgaccaaaacatggtgatgcctaggtctggcagtgaagaccatccagcaacaccttggacaactgaacatgcttcacaggcgctccggcctcccgcgccccagcgactcgaacgccgtgagcctcgtcatgcgccgcatcaggaaggaaaacgtcgatgccggcgaaagggcaaagcaggccctcgcgttcgagaggaccgatttcgaccaggtccgcagcctgatggagaacagcgacaggtgccaggacattaggaacctggcgttcctcggaattgcatacaacacgctcctcaggatcgcggaaattgcccgcattcgcgtgaaggacattagccgcaccgacggcggcaggatgcttatccacattggcaggaccaagacgctcgtttccaccgcaggcgtcgaaaaggccctcagcctcggagtgaccaagctcgtcgaacgctggatctccgtgtccggcgtcgcggacgacccaaacaactacctcttctgccgcgtccgcaagaacggggtggctgcccctagcgccaccagccaactcagcacgagggccttggaaggtattttcgaggccacccaccgcctgatctacggcgcgaaggatgacagcggtcaacgctacctcgcatggtccgggcactccgcccgcgttggagctgctagggacatggcccgcgccggtgtttccatccccgaaatcatgcaggcgggtggatggacgaacgtgaacattgtcatgaactacattcgcaaccttgacagcgagacgggcgcaatggttcgcctcctggaagatggtgactgaggtacccaacctagacttgtccatcttctggattggccaacttaattaatgtatgaaataaaaggatgcacacatagtgacatgctaatcactataatgtgggcatcaaagttgtgtgttatgtgtaattactagttatctgaataaaagagaaagagatcatccatatttcttatcctaaatgaatgtcacgtgtctttataattctttgatgaaccagatgcatttcattaaccaaatccatatacatataaatattaatcatatataattaatatcaattgggttagcaaaacaaatctagtctaggtgtgttttgcgatccgataatcgatgggtctaaaaacggcccctaactaacgcttagttgcccgctagattagtcccccgttagtgcctagttagacacacgacgaactaggggctagcacgcgttagataacttcgtatagcatacattatacgaagttattccggaccgggttaccgaattcaattcctgcccttaaggccaattgttcaagattcattcaacaattgaaacatctcccatgattaaatcagtataaggttgctatggtcttgcttgacaaagtttttttttgagggaatttcaactaaatttttgagtgaaactatcaaatactgattttaaaaaatttttataaaaggaagcgcagagataaaaggccatctatgctacaaaagtacccaaaaatgtaatcctaaagtatgaattgcattttttttttgtttggacgaaaggaaaggagtattaccacaagaatgatatcatcttcatatttagatcttttttgggtaaagcttgagattctctaaatatagagaaatcagaagaaaaaaaaaccgtgttttggtggttttgatttctagcctccacaataactttgacggcgtcgacaagtctaacggacaccaagcagcgaaccaccagcgccgagccaagcgaagcagacggccgagacgttgacaccttcggcgcggcatctctcgagagttccgctccggcgctccacctccaccgctggcggtttcttattccgttccgttccgcctcctgctctgctcctctccacaccacacggcacgaaaccgttacggcaccggcagcacccagcacgggagaggggattcctttcccaccgttccttccctttccgccccgccgctataaatagccagccccatccccagcttttttccccaatctcatctcctctctcctgttgttcggagcacacgcacaatccgatcgatccccaaatccccttcgtctctcctcgcgagcctcgtggatcccagcttcaaggtacggcgatcgatcatcccccctccttctctctaccttcttttctctagactacatcggatggcgatccatggttagggcctgctagtttcccttcctgttttgtcgatggctgcgaggcacaatagatctgatggcgttatgacggctaacttgtcatgttgttgcgatttatagtccctttaggagatcagtttaatttctcggatggttcgagatcggtggtccatggttagtaccctaagatccgcgctgttagggttcgtagatggaggcgacctgttctgattgttaacttgtcagtacctgggaaatcctgggatggttctagctcgtccgcagatgagatcgatttcatgatcctctgtatcttgtttcgttgcctaggttccgtctaatctatccgtggtatgatgtagatgttttgatcgtgctaactacgtcttgtaaagttaattgtcaggtcataatttttagcatgcctttttttttgtttggttttgtctaattgggctgtcgttctagatcagagtagaagactgttccaaactacctgctggatttattgaacttggatctgtatgtgtgtcacatatcttcataaattcatgattaagatggattgaaatatcttttatctttttggtatggatagttctatatgttggtgtggctttgttagatgtatacatgcttagatacatgaagcaacgtgctgctactgtttagtaattgctgttcatttgtctaataaacagataaggatatgtatttatgttgctgttggttttgctggtactttgttggatacaaatgcttcaatacagaaaacagcatgctgctacgatttaccatttatctaatcttatcatatgtctaatctaataaacaaacatgcttttaaattatcttcatatgcttggatgatggcatacacagcggctatgtgtggttttttaaatacccagcatcatgggcatgcatgacactgctttaatatgctttttatttgcttgagactgtttcttttgtttatactgaccctttagttcggtgactcttctgcaggtcgactttaacttagcctaggatccatggcccagtccaagcacggcctgaccaaggagatgaccatgaagtaccgcatggagggctgcgtggacggccacaagttcgtgatcaccggcgagggcatcggctaccccttcaagggcaagcaggccatcaacctgtgcgtggtggagggcggccccttgcccttcgccgaggacatcttgtccgccgccttcatgtacggcaaccgcgtgttcaccgagtacccccaggacatcgtcgactacttcaagaactcctgccccgccggctacacctgggaccgctccttcctgttcgaggacggcgccgtgtgcatctgcaacgccgacatcaccgtgagcgtggaggagaactgcatgtaccacgagtccaagttctacggcgtgaacttccccgccgacggccccgtgatgaagaagatgaccgacaactgggagccctcctgcgagaagatcatccccgtgcccaagcagggcatcttgaagggcgacgtgagcatgtacctgctgctgaaggacggtggccgcttgcgctgccagttcgacaccgtgtacaaggccaagtccgtgccccgcaagatgcccgactggcacttcatccagcacaagctgacccgcgaggaccgcagcgacgccaagaaccagaagtggcacctgaccgagcacgccatcgcctccggctccgccttgccctccggactcagatctcgatagggtaccaatggccagttaacagatccagctgctgctgttctagggttcacaagtctgcctatttgtcttccccaatggagctatggttgtctggtctggtccttggtcgtgtcccgtttcattgtgtactatttacctgtaatgtgtatccttaagtctggtttgatggtgtctgaaacgttttgctgtggtagagcagcatggaagaactataatgaataagtgatccctaatcattgtgtccaaattttgcttctgctatacccttttgtgctgtttcttatgttttgcttaaaaatttgatctgacaaacaaatttgtctaaattatgctcttgttctgactgtgtactgtacacatttgtattgctaccggtttggcacatagttttctctttgattgcagatcaaacccttctgattgcagattgcttggctatggctgatgtgctcactgttcttctttagcttgtatattgctgatggtggcttggctacggctgaaaaagttgctgctgcgccgacttggcaactgttgctccagtaatgctttgtcctctcttcctagccgccgacttggcacttggcagctgttgctcctgtaatgcgttgttatctcttatctcttgagatgtactatgattttgaggctgtttgacttgtgccagattgccagtgctgatgctatattatctcaggtttttatgctagtatatgttttactgtgtgctgcctgtgtcgagttacgtaatctattgaaccgctatgcgtgttgatgccctgttgttgcttgccagattgatgcccctgttgcttgcagcttgcaagctgtagtgaaatcctaaaattcgaaaccaaatctattctgaacttttgaagatctgtgatgtccggaagaaaagattcaaacagataaacgggactctccagaatctataaaataaatgatcgacaaacgctttgctttggtaggcttcctagttagttagcggaccgaagcttcggtccgggcctagaaggccagcttcggccgcccctcggtaccctgggatctgcccttactttaacgcctctaaccaacacccctttatctttataaggaacaataaacagaatttgccccactgttctaaatcacctaataatatccccagctaaaaacaataaaggtttcctagaattaagacaagcatgactgttcctccaggagggtttggaacattgttgcagtcttgcagatacgggcgaagggtgagaaacagagcggagggctggaggtgacctcggtagtcgacgccggagttgagcttgacaacgacggggcggcccctgatggacttgaggaagtccgatggcgtcttcaccgtcccgccggcgcccgaggcgggcctgtcgctgccgccgccgccgctgctcatcttgcgcgctgtgcccccggcggtgtccctgtgttgcggatcgcgggtgggccaggtggatgcgagggcgacccgtttggactccggccggagccgccggatccctggtcggtgtcagtgccgtttactctgggccccacgtgtcagtaccgtctgtagatgacaacaacccgtcgtccacagtcatgtccaaaatatcctttcttcttttttttcgattcggatatctatcttccttttttttttccaaaaatcttcttgacgcaccagcgcgcacgtttgtggtaaacgccgacacgtcggtcccacgtcgatagaccccacccaccagtgagtagcgtgtacgtattcgggggtgacggacgtgtcgccgtcgtcttgctagtcccattcccatctgagccacacatctctgaacaaaaaaaaggagggaggcctccacgcacatccccctccgtgccacccgccccaaaccctcgcgccgcctccgagacagccgccgcaaccatggccaccgccgccgccgcgtctaccgcgctcactggcgccactaccgctgcgcccaaggcgaggcgccgggcgcacctcctggccacccgccgcgccctcgccgcgcccatcaggtgctcagcggcgtcacccgccatgccgatggctcccccggccaccccgctccggccgtggggccccaccgagccccgcaagggtgctgacatcctcgtcgagtccctcgagcgctgcggcgtccgcgacgtcttcgcctaccccggcggcgcgtccatggagatccaccaggcactcacccgctcccccgtcatcgccaaccacctcttccgccacgagcaaggggaggcctttgccgcctccggctacgcgcgctcctcgggccgcgtcggcgtctgcatcgccacctccggccccggcgccaccaacctagtctccgcgctcgccgacgcgctgctcgattccgtccccatggtcgccatcacgggacaggtggcgcgacgcatgattggcaccgacgccttccaggagacgcccatcgtcgaggtcacccgctccatcaccaagcacaactacctggtcctcgacgtcgacgacatcccccgcgtcgtgcaggaggctttcttcctcgcctcctctggtcgaccagggccggtgcttgtcgacatccccaaggacatccagcagcagatggcggtgcctgtctgggacaagcccatgagtctgcctgggtacattgcgcgccttcccaagccccctgcgactgagttgcttgagcaggtgctgcgtcttgttggtgaatcgcggcgccctgttctttatgtgggcggtggctgcgcagcatctggtgaggagttgcgacgctttgtggagctgactggaatcccggtcacaactactcttatgggcctcggcaacttccccagcgacgacccactgtctctgcgcatgctaggtatgcatgggacggtgtatgcaaattatgcagtggataaggccgatctgttgcttgcacttggtgtgcggtttgatgatcgcgtgacagggaagattgaggcttttgcaagcagggctaagattgtgcacgttgatattgatccggctgagattggcaagaacaagcagccacatgtgtccatctgtgcagatgttaagcttgctttgcagggcatgaatgctcttcttgaaggaagcacatcaaagaagagctttgactttggctcatggaacgatgagttggatcagcagaagagggaattcccccttgggtataaaacatctaatgaggagatccagccacaatatgctattcaggttcttgatgagctgacgaaaggcgaggccatcatcggcacaggtgttgggcagcaccagatgtgggcggcacagtactacacttacaagcggccaaggcagtggttgtcttcagctggtcttggggctatgggatttggtttgccggctgctgctggtgcttctgtggcaaacccaggtgtcactgttgttgacatcgatggagatggtagctttctcatgaacgttcaggagctagctatgatccgaattgagaacctcccagtgaaggtctttgtgctaaacaaccagcacctggggatggtggtgcagttggaggacaggttctataaggccaacagagcgcacacatacttgggaaacccagagaatgaaagtgagatatatccagatttcgtgacgatcgccaaagggttcaacattccagccgtccgtgtgacaaagaagaacgaagtccgcgcagcgataaagaagatgctcgagactccagggccgtacctcttggatataatcgtcccacaccaggagcatgtgttgcctatgatccctagtggtggggctttcaaggatatgatcctggatggtgatggcaggactgtgtactgacttcgaataggtacccggggatcctctagtgccgtgggtcgtttaagctgccgctgtacctgtgtcgtctggtgccttctggtgtacctgggaggttgtcgtctatcaagtatctgtggttggtgtcatgagtcagtgagtcccaatactgttcgtgtcctgtgtgcattatacccaaaactgttatgggcaaatcatgaataagcttgatgttcgaacttaaaagtctctgctcaatatggtattatggttgtttttgttcgtctcctaatatttgcctgggatcaaattttattggctggtgttcatttgacctccatgttcttgctaggctccattttttactctacagccataatatgtttgattgtttggtttgttctttgttgtacacctggttctgtcgagcttagttttcgacactggcttacagcttaacatgttgctattttattgggttctgattgctattttattgggttctgattgctagtttttgctgaatccaaaaaccatgttatttatttaagcgatccaggttattattatgatggtggctaagtttttttttttccaagggtaaattttctggattctccagtgtttctgtggccgaattcaatcactagagtcgacctgcaaagcttcggtccgggcctagaaggcccgcgccacttacgcttgattccgatgacttcgtaggttcctagctcaagccgctcgtgtccaagcgtcacttacgattagctaatgattacggcatctaggaccgactagttcttatgtgcttctagtctccaaatgtggttgatagttattttgctctaagatcaacagtaatgaagtataaatcatcgttgtggtgtgctactcggttaattgagcattaacacacacaaacatgacgaggatggtataatctccaaaaatgtgtactttgttaggtgggaccctatagccttgattaatgtgctatgttaggcatgcctggaaacgtgtgacgcatatgttttgtgaacctgttgatattatatgtgcttttatattaccatattttattaaaatactaatatttattactagtaagatataacattctatctagcttaaaaactaaccataaatattccataataactagatttaccaaactaatatactaaatatacataataaatacaaaattaacaagacaataatcaatatttatgagcttaatatatttagacattatggttggtcgacgataatcatgctaacttttcgtaattgcttgattgaaatatgcttagaataatgcctctttgttctacatggcaaatagggaccattatggtgtaacaccctgggaaccacaaacaccccgaaatgctactaaactacacaactaaccttcatatataaaatttcgacagcatctcctttgaaaatttgcatagacgtggaagcaacagagtataaacagatctgcgtttaaacgtgcaagcgctactagacaattcagtacattaaaaacgtccgcaatgtgttattaagttgtctaagcgtcaatttgtttacaccacaatatatcctgcca

SEQ ID NO: 163 - DNA, 20879 bp, unidentified
  source 1..20879: mol_type = other DNA; note = Artificial
gtttacccgccaatatatcctgtcaaacactgcggccgcacttgaccgcggatggagccggagctgtggtgaggccatcgacgggaggtgggggagaacacagtctcagtgttctttgtgagtccgcaaggtttttagcttttctgtattaattaaggttgctgttggctgtagaatacggtcgtggaagagctgtatcggtagctactacgtaagctattatatactggaagtctggagctcgtcgatctccggtcgtcttcctccatttctcctcgtcttgctttgactgctgctaccatttgcttctgttttctgatgaagcatgccatgtcggccaccagtgtttgtgtggtttttgcagggaatggctttcaagtgctgtgattgaatggccctcgtcgtcctcggctgagctcacatggacgcgtcatgtgagtgagatatatgatcatatgatgagtggggttcgggtgagtgcgtacttgaagtaggatcccgctttcactcattcattcattggcctttaaaccgggaaattttcgcgaggagatggagggaagcaagcagggtgacgagtgcagagtgccgcgagcgctttgtcaaaaggcaccgccgtaggcaaaaaaatcaatggccctgactgactcgatggtagtactactgtagagactagagagggttgctccccatatcttcgtgtgacttttactccagcattgcatttccgtcattgagacgttaattaatagcagctttcgggacagatgactgtggccatgtttcgtcacggccgcttcgtgccagctgggggtactatagtactgtgattttgttagtaaaaactttcattaggccaccattgacgaccgggccttcgcttttgctgcgctaattaaccatttcccggcgaccgaagggaacatgaacatgccccgacacatgagggcatgaggactagtgttctccctgtcgttcgttgacttgactagtgatagtttaaacgctcttcaactggaagagcggttactaccggttcactagctagctgctaatcgagctagttaccctatgaggtgacatgaagcgctcacggttactatgacggttagcttcacgactgttggtggcagtagcgtacgacttagctatagttccggacttacctagctaataacttcgtatagcatacattatacgaagttatggttaccgccctggccgaagctttccggacttacccttaagcgatttaaatcctgaggcctgcaacactgatagtttaaactgaaggcgggaaacgacaatctgatcatgagcggagaattaagggagtcacgttatgacccccgccgatgacgcgggacaagccgttttacgtttggaactgacagaaccgcaacgattgaaggagccactcagccgcgggtttctggagtttaatgagctaagcacatacgtcagaaaccattattgcgcgttcaaaagtcgcctaaggtcactatcagctagcaaatatttcttgtcaaaaatgctccactgacgttccataaattcccctcggtatccaattagagtctcatattcactcccatggcggccaatgcgggcggcggtggagcgggaggaggcagcggcagcggcagcgtggctgcgccggcggtgtgccgccccagcggctcgcggtggacgccgacgccggagcagatcaggatgctgaaggagctctactacggctgcggcatccggtcgcccagctcggagcagatccagcgcatcaccgccatgctgcggcagcacggcaagatcgagggcaagaacgtcttctactggttccagaaccacaaggcccgcgagcgccagaagcgccgcctcaccagcctcgacgtcaacgtgcccgccgccggcgcggccgacgccaccaccagccaactcggcgtcctctcgctgtcgtcgccgccgccttcaggcgcggcgcctccctcgcccaccctcggcttctacgccgccggcaatggcggcggatcggctgtgctgctggacacgagttccgactggggcagcagcggcgctgctatggccaccgagacatgcttcctgcaggactacatgggcgtgacggacacgggcagctcgtcgcagtggccacgcttctcgtcgtcggacacgataatggcggcggccgcggcgcgggcggcgacgacgcgggcgcccgagacgctccctctcttcccgacctgcggcgacgacggcggcagcggtagcagcagctacttgccgttctggggtgccgcgtccacaactgccggcgccacttcttccgttgcgatccaacagcaacaccagctgcaggagcagtacagcttttacagcaacagcaacagcacccagctggccggcaccggcaaccaagacgtatcggcaacagcagcagcagccgccgccctggagctgagcctcagctcatggtgctccccttaccctgctgcagggagtatgtgagagcaacgcgagctgccactgctcttcactgatgtctctggaatggaaggaggaggaagtgagaacagatcattcgacaaagcagcattagtccgttgatcggtggaagaccactcgtcagtgttgagttgaatgtttgatcaataaaatacggcaatgctgtaagggttgttttttatgccattgataatacactgtactgttcagttgttgaactctatttcttagccatgccaagtgcttttcttattttgaataacattacagcaaaaagttgaaagacaaaaaaaaaaacccccgaacagagtgctttgggtcccaagcttctttagactgtgttcggcgttccccctaaatttctccccctatatctcactcacttgtcacatcagcgttctctttccccctatatctccacgctctacagcagttccacctatatcaaacctctataccccaccacaacaatattatatactttcatcttcaactaactcatgtaccttccaatttttttctactaataattatttacgtgcacagaaacttagcaaggagagagagagcgggaatttaaatgctcggcgttaggcttttagtccgctaggtggctagaccgaggttaggacgctagttcactaggggcctagtggtgttttaagacgtcacggtcaccgcggccgcatcgagcagctggcttgtggggaccagacaaaaaaggaatggtgcagaattgttaggcgcacctaccaaaagcatctttgcctttattgcaaagataaagcagattcctctagtacaagtggggaacaaaataacgtggaaaagagctgtcctgacagcccactcactaatgcgtatgacgaacgcagtgacgaccacaaaactcgagcaacgagatcatgagccaatcaaagaggagtgatgtagacctaaagcaataatggagccatgacgtaagggcttacgcccatacgaaataattaaaggctgatgtgacctgtcggtctctcagaacctttactttttatgtttggcgtgtatttttaaatttccacggcaatgacgatgtgaccgtcgacccactaaaacattgctttgtcaaaagctaaaaaagatgatgcccgacagccacttgtgtgaagcatgagaagccggtccctccactaagaaaattagtgaagcatcttccagtggtccctccactcacagctcaatcagtgagcaacaggacgaaggaaatgacgtaagccatgacgtctaatcccattcgaaacgcgtggaccgaagcttgcatgcctgcagtgcagcgtgacccggtcgtgcccctctctagagataatgagcattgcatgtctaagttataaaaaattaccacatattttttttgtcacacttgtttgaagtgcagtttatctatctttatacatatatttaaactttactctacgaataatataatctatagtactacaataatatcagtgttttagagaatcatataaatgaacagttagacatggtctaaaggacaattgagtattttgacaacaggactctacagttttatctttttagtgtgcatgtgttctcctttttttttgcaaatagcttcacctatataatacttcatccattttattagtacatccatttagggtttagggttaatggtttttatagactaatttttttagtacatctattttattctattttagcctctaaattaagaaaactaaaactctattttagtttttttatttaataatttagatataaaatagaataaaataaagtgactaaaaattaaacaaataccctttaagaaattaaaaaaactaaggaaacatttttcttgtttcgagtagataatgccagcctgttaaacgccgtcgacgagtctaacggacaccaaccagcgaaccagcagcgtcgcgtcgggccaagcgaagcagacggcacggcatctctgtcgctgcctctggacccctctcgagagttccgctccaccgttggacttgctccgctgtcggcatccagaaattgcgtggcggagcggcagacgtgagccggcacggcaggcggcctcctcctcctctcacggcaccggcagctacgggggattcctttcccaccgctccttcgctttcccttcctcgcccgccgtaataaatagacaccccctccacaccctctttccccaacctcgtgttgttcggagcgcacacacacacaaccagatctcccccaaatccacccgtcggcacctccgcttcaaggtacgccgctcgtcctcccccccccccctctctaccttctctagatcggcgttccggtccatgcatggttagggcccggtagttctacttctgttcatgtttgtgttagatccgtgtttgtgttagatccgtgctgctagcgttcgtacacggatgcgacctgtacgtcagacacgttctgattgctaacttgccagtgtttctctttggggaatcctgggatggctctagccgttccgcagacgggatcgatttcatgattttttttgtttcgttgcatagggtttggtttgcccttttcctttatttcaatatatgccgtgcacttgtttgtcgggtcatcttttcatgcttttttttgtcttggttgtgatgatgtggtctggttgggcggtcgttctagatcggagtagaattctgtttcaaactacctggtggatttattaattttggatctgtatgtgtgtgccatacatattcatagttacgaattgaagatgatggatggaaatatcgatctaggataggtatacatgttgatgcgggttttactgatgcatatacagagatgctttttgttcgcttggttgtgatgatgtggtgtggttgggcggtcgttcattcgttctagatcggagtagaatactgtttcaaactacctggtgtatttattaattttggaactgtatgtgtgtgtcatacatcttcatagttacgagtttaagatggatggaaatatcgatctaggataggtatacatgttgatgtgggttttactgatgcatatacatgatggcatatgcagcatctattcatatgctctaaccttgagtacctatctattataataaacaagtatgttttataattattttgatcttgatatacttggatgatggcatatgcagcagctatatgtggatttttttagccctgccttcatacgctatttatttgcttggtactgtttcttttgtcgatgctcaccctgttgtttggtgttacttctgcaggtcgactttaacttagcctaggatccatggccactgtgaacaactggctcgctttctccctctccccgcaggagctgccgccctcccagacgacggactccacactcatctcggccgccaccgccgaccatgtctccggcgatgtctgcttcaacatcccccaagattggagcatgaggggatcagagctttcggcgctcgtcgcggagccgaagctggaggacttcctcggcggcatctccttctccgagcagcatcacaaggccaactgcaacatgatacccagcactagcagcacagtttgctacgcgagctcaggtgctagcaccggctaccatcaccagctgtaccaccagcccaccagctcagcgctccacttcgcggactccgtaatggtggcttcctcggccggtgtccacgacggcggtgccatgctcagcgcggccgccgctaacggtgtcgctggcgctgccagtgccaacggcggcggcatcgggctgtccatgattaagaactggctgcggagccaaccggcgcccatgcagccgagggtggcggcggctgagggcgcgcaggggctctctttgtccatgaacatggcggggacgacccaaggcgctgctggcatgccacttctcgctggagagcgcgcacgggcgcccgagagtgtatcgacgtcagcacagggtggagccgtcgtcgtcacggcgccgaaggaggatagcggtggcagcggtgttgccggcgctctagtagccgtgagcacggacacgggtggcagcggcggcgcgtcggctgacaacacggcaaggaagacggtggacacgttcgggcagcgcacgtcgatttaccgtggcgtgacaaggcatagatggactgggagatatgaggcacatctttgggataacagttgcagaagggaagggcaaactcgtaagggtcgtcaagtctatttaggtggctatgataaagaggagaaagctgctagggcttatgatcttgctgctctgaagtactggggtgccacaacaacaacaaattttccagtgagtaactacgaaaaggagctcgaggacatgaagcacatgacaaggcaggagtttgtagcgtctctgagaaggaagagcagtggtttctccagaggtgcatccatttacaggggagtgactaggcatcaccaacatggaagatggcaagcacggattggacgagttgcagggaacaaggatctttacttgggcaccttcagcacccaggaggaggcagcggaggcgtacgacatcgcggcgatcaagttccgcggcctcaacgccgtcaccaacttcgacatgagccgctacgacgtgaagagcatcctggacagcagcgccctccccatcggcagcgccgccaagcgcctcaaggaggccgaggccgcagcgtccgcgcagcaccaccacgccggcgtggtgagctacgacgtcggccgcatcgcctcgcagctcggcgacggcggagccctggcggcggcgtacggcgcgcactaccacggcgccgcctggccgaccatcgcgttccagccgggcgccgccagcacaggcctgtaccacccgtacgcgcagcagccaatgcgcggcggcgggtggtgcaagcaggagcaggaccacgcggtgatcgcggccgcgcacagcctgcaggacctccaccacctgaacctgggcgcggccggcgcgcacgactttttctcggcagggcagcaggccgccgccgctgcgatgcacggcctgggtagcatcgacagtgcgtcgctcgagcacagcaccggctccaactccgtcgtctacaacggcggggtcggcgacagcaacggcgccagcgccgtcggcggcagtggcggtggctacatgatgccgatgagcgctgccggagcaaccactacatcggcaatggtgagccacgagcaggtgcatgcacgggcctacgacgaagccaagcaggctgctcagatggggtacgagagctacctggtgaacgcggagaacaatggtggcggaaggatgtctgcatgggggactgtcgtgtctgcagccgcggcggcagcagcaagcagcaacgacaacatggccgccgacgtcgggcatggcggcgcgcagctcttcagtgtctggaacgacacttaagcgtacctagtggtacctgacatcttatagtctgcaacctctcgtgtctgaattcctatctttatcaagtgttattgcttccacgactataggacagctttcgtcgaaagcttttgctcatgtgatctcgaaggattcatctagtctgatttttcgtgacttgtatcggttttattggattcatccaacatatatcaataaaaaatgagttgtgtttcctttcttcctagttcagttaaaattatttccctcctgcgcttgtgctgtaattgtctgtgtacctgttgtttgtgactgtgttagttcccttggatatgatttcgtatttgatatgtacatggagatagcttagcttcattattggagtatgaagttagtatgacatagtcactctcctggaaaattgacactgcaaaccatatttttattctgaaccacaaatcctagtcagtccgctggcatatgccgtccgtttgctgaatccagaacgtgggtttggagatgtacggctgagatgcctctatgcgaaggggatttcgtggtgaaacgagatgggagtagagcaacgcccgtggaagatgcttcaaacttccacacttttgagcaacgatcggcagtagtaaggtagacgatttcaagatcaaagcatatgaagataaacaacatcaacaacaaaatttgttggggttctatagagagaaacagagctacatacatacactgttttgtatctaccatctgagatgatgaaaagatgaaaaactaaagaatgccccggcgccaacgccaggacacgccgcgcgcgcgtcacccgagccatctcttgacccagccggcgctgtatatttacacacgttgcagcatcgatcaccacctgttcgatcgcgtcgccgtcaccggcgcgccgcgacttattgaactagtctagggcgcggctaacaacctagcttagattgccttgtctaaacccttaggctaacgcgccactctagaaggccgatctccccgggtttaccgagctcctcatttggcaatactactgccccgggcctgcagcagtatccaaatggaccggcccatttatgtggcccctgtcctttttcatcaggcatcggttttgggctcacagaggagatggtctagaggttcacaaactcaatacaacacacagtggagtagggtattacgctccggcggcccgaaccactctaaatccttgtgtcctcgtgtgctcttccaccattaatgactgtaattgcagggacacgaagagttgtagcgcttttgccaacaagatccgctatatgctagtagagtggaacctgcacagcaacaagcatccaataatctgagaataagaattatgtgtggtgatggttctcatctctgcaactcgccattttcgcgagagaaccaaatccaagttggtgaagatcatgatttgggctcatgggctggcatagtagctattacctttgcaattgtggttcgaatctatccgatattctccttttcagggagagctaatgcttatgcttattgggtattttggtttgacactgcttcacgcccaaaaaaaggcaactatgtctgagttggatatggcccaaaaaaaggcagctatgtctgagttggatatggaagtcttctttcgtttagggtgaagtaagaccaagctcatgagcttattatcttaggtcggaacaaattagttgataggcatggcacatttatcaaattataatgattttaacagaaaagcaacacctctttttcagcagcaccagctttgcaagctgcaattgacactccaagcatagtatttgctccaaactcagcctgcatttcgcacaatatcatatctatttccatttggataaaatatattttccagaaatatgggaacagaatcaagatacagaaaaaagttgtggtagtagtggtaagtggaaacacaagtacagtgaaaagatagcattatttctgaacagtcaaattaaccgaaataagtagtatcacatactgcccctaaattgactacacccaatgtaaagaattgcttgagcatattgagccatcagttgtttgtttgtgtaacggatttgacaatgcagagttcaggagcaaaaaaccgcaaaggagagaaagagggaaaggatctcctagtatcccaccttgtggcgcgccctgtcaagtgcatgatggcctggtcgatctgcgtctgctgctgcggttccatcccaacgagtgcctccgacaccttgtcgttgatcacccgcaccgcgtaggcgacccccctggcgaggaacttccgcctctcggaggccccggccgcgtcggcggcggcgccctcgagcgcgcccacgctagccgtagatgctcggtgcacggccttgttggtgtgcaactcgacctcaacggccggtgcgctacgcccgtcaaggatctggcgcgcccgcaccctcgtgatcacggtgggcgcctcccgcctcatgtggccgacgatgaaaagcgccgggttaggggccttggcgcgcaccgccgtattcagggcctcctcgctcttgcgcgagagcaggtgcttccccaggtactcctgcactgacaaggctgccacagcggtggaatttgtcctcacgacttcgccacgtcgtcctcacctccctggcttcccacgactccgccgtatcgaggtgctcggtgggtcgtcttaatccgaagtccgaactaggaagacgagacagagaggtctgaggaatgggcctcgtttgatgttgagctgaattatttttccagcataagcccaggtcttggtccatgaacaaaattactagaaacccagcccagtactacgatctaaaagagggactgccactggatagctctctctagcattctccacgctccaatacagcggcgtcgtgtctatccgggtctatccgcgaacacgtgagaactctccagaaactgctttctcctccacttcatctctctcgctttccctctataaaaagaccccttctaggaattgagggagacagcaagcaccaagcagcgatccgaagctcaatcaattcactcaaacctcttccccaaatcttcgattagatcttcgttgacaagaagactagaaccgaacctgacatgtccaacctgctcacggttcaccagaaccttccggctcttccagtggacgcgacgtccgatgaagtcaggaagaacctcatggacatgttccgcgacaggcaagcgttcagcgagcacacctggaagatgctgctctccgtctgccgctcctgggctgcatggtgcaagctgaacaacaggaagtggttccccgctgagcccgaggacgtgagggattaccttctgtacctgcaagcgcgaggtttgtttctgcttctacctttgatatatatataataattatcattaattagtagtaatataatatttcaaatatttttttcaaaataaaagaatgtagtatatagcaattgcttttctgtagtttataagtgtgtatattttaatttataacttttctaatatatgaccaaaacatggtgatgcctaggtctggcagtgaagaccatccagcaacaccttggacaactgaacatgcttcacaggcgctccggcctcccgcgccccagcgactcgaacgccgtgagcctcgtcatgcgccgcatcaggaaggaaaacgtcgatgccggcgaaagggcaaagcaggccctcgcgttcgagaggaccgatttcgaccaggtccgcagcctgatggagaacagcgacaggtgccaggacattaggaacctggcgttcctcggaattgcatacaacacgctcctcaggatcgcggaaattgcccgcattcgcgtgaaggacattagccgcaccgacggcggcaggatgcttatccacattggcaggaccaagacgctcgtttccaccgcaggcgtcgaaaaggccctcagcctcggagtgaccaagctcgtcgaacgctggatctccgtgtccggcgtcgcggacgacccaaacaactacctcttctgccgcgtccgcaagaacggggtggctgcccctagcgccaccagccaactcagcacgagggccttggaaggtattttcgaggccacccaccgcctgatctacggcgcgaaggatgacagcggtcaacgctacctcgcatggtccgggcactccgcccgcgttggagctgctagggacatggcccgcgccggtgtttccatccccgaaatcatgcaggcgggtggatggacgaacgtgaacattgtcatgaactacattcgcaaccttgacagcgagacgggcgcaatggttcgcctcctggaagatggtgactgaggtacccaacctagacttgtccatcttctggattggccaacttaattaatgtatgaaataaaaggatgcacacatagtgacatgctaatcactataatgtgggcatcaaagttgtgtgttatgtgtaattactagttatctgaataaaagagaaagagatcatccatatttcttatcctaaatgaatgtcacgtgtctttataattctttgatgaaccagatgcatttcattaaccaaatccatatacatataaatattaatcatatataattaatatcaattgggttagcaaaacaaatctagtctaggtgtgttttgcgatccgataatcgatgggtctaaaaacggcccctaactaacgcttagttgcccgctagattagtcccccgttagtgcctagttagacacacgacgaactaggggctagcacgcgttagataacttcgtatagcatacattatacgaagttattccggaccgggttaccgaattcaattcctgcccttaaggccaattgttcaagattcattcaacaattgaaacatctcccatgattaaatcagtataaggttgctatggtcttgcttgacaaagtttttttttgagggaatttcaactaaatttttgagtgaaactatcaaatactgattttaaaaaatttttataaaaggaagcgcagagataaaaggccatctatgctacaaaagtacccaaaaatgtaatcctaaagtatgaattgcattttttttttgtttggacgaaaggaaaggagtattaccacaagaatgatatcatcttcatatttagatcttttttgggtaaagcttgagattctctaaatatagagaaatcagaagaaaaaaaaaccgtgttttggtggttttgatttctagcctccacaataactttgacggcgtcgacaagtctaacggacaccaagcagcgaaccaccagcgccgagccaagcgaagcagacggccgagacgttgacaccttcggcgcggcatctctcgagagttccgctccggcgctccacctccaccgctggcggtttcttattccgttccgttccgcctcctgctctgctcctctccacaccacacggcacgaaaccgttacggcaccggcagcacccagcacgggagaggggattcctttcccaccgttccttccctttccgccccgccgctataaatagccagccccatccccagcttttttccccaatctcatctcctctctcctgttgttcggagcacacgcacaatccgatcgatccccaaatccccttcgtctctcctcgcgagcctcgtggatcccagcttcaaggtacggcgatcgatcatcccccctccttctctctaccttcttttctctagactacatcggatggcgatccatggttagggcctgctagtttcccttcctgttttgtcgatggctgcgaggcacaatagatctgatggcgttatgacggctaacttgtcatgttgttgcgatttatagtccctttaggagatcagtttaatttctcggatggttcgagatcggtggtccatggttagtaccctaagatccgcgctgttagggttcgtagatggaggcgacctgttctgattgttaacttgtcagtacctgggaaatcctgggatggttctagctcgtccgcagatgagatcgatttcatgatcctctgtatcttgtttcgttgcctaggttccgtctaatctatccgtggtatgatgtagatgttttgatcgtgctaactacgtcttgtaaagttaattgtcaggtcataatttttagcatgcctttttttttgtttggttttgtctaattgggctgtcgttctagatcagagtagaagactgttccaaactacctgctggatttattgaacttggatctgtatgtgtgtcacatatcttcataaattcatgattaagatggattgaaatatcttttatctttttggtatggatagttctatatgttggtgtggctttgttagatgtatacatgcttagatacatgaagcaacgtgctgctactgtttagtaattgctgttcatttgtctaataaacagataaggatatgtatttatgttgctgttggttttgctggtactttgttggatacaaatgcttcaatacagaaaacagcatgctgctacgatttaccatttatctaatcttatcatatgtctaatctaataaacaaacatgcttttaaattatcttcatatgcttggatgatggcatacacagcggctatgtgtggttttttaaatacccagcatcatgggcatgcatgacactgctttaatatgctttttatttgcttgagactgtttcttttgtttatactgaccctttagttcggtgactcttctgcaggtcgactttaacttagcctaggatccatggcccagtccaagcacggcctgaccaaggagatgaccatgaagtaccgcatggagggctgcgtggacggccacaagttcgtgatcaccggcgagggcatcggctaccccttcaagggcaagcaggccatcaacctgtgcgtggtggagggcggccccttgcccttcgccgaggacatcttgtccgccgccttcatgtacggcaaccgcgtgttcaccgagtacccccaggacatcgtcgactacttcaagaactcctgccccgccggctacacctgggaccgctccttcctgttcgaggacggcgccgtgtgcatctgcaacgccgacatcaccgtgagcgtggaggagaactgcatgtaccacgagtccaagttctacggcgtgaacttccccgccgacggccccgtgatgaagaagatgaccgacaactgggagccctcctgcgagaagatcatccccgtgcccaagcagggcatcttgaagggcgacgtgagcatgtacctgctgctgaaggacggtggccgcttgcgctgccagttcgacaccgtgtacaaggccaagtccgtgccccgcaagatgcccgactggcacttcatccagcacaagctgacccgcgaggaccgcagcgacgccaagaaccagaagtggcacctgaccgagcacgccatcgcctccggctccgccttgccctccggactcagatctcgatagggtaccaatggccagttaacagatccagctgctgctgttctagggttcacaagtctgcctatttgtcttccccaatggagctatggttgtctggtctggtccttggtcgtgtcccgtttcattgtgtactatttacctgtaatgtgtatccttaagtctggtttgatggtgtctgaaacgttttgctgtggtagagcagcatggaagaactataatgaataagtgatccctaatcattgtgtccaaattttgcttctgctatacccttttgtgctgtttcttatgttttgcttaaaaatttgatctgacaaacaaatttgtctaaattatgctcttgttctgactgtgtactgtacacatttgtattgctaccggtttggcacatagttttctctttgattgcagatcaaacccttctgattgcagattgcttggctatggctgatgtgctcactgttcttctttagcttgtatattgctgatggtggcttggctacggctgaaaaagttgctgctgcgccgacttggcaactgttgctccagtaatgctttgtcctctcttcctagccgccgacttggcacttggcagctgttgctcctgtaatgcgttgttatctcttatctcttgagatgtactatgattttgaggctgtttgacttgtgccagattgccagtgctgatgctatattatctcaggtttttatgctagtatatgttttactgtgtgctgcctgtgtcgagttacgtaatctattgaaccgctatgcgtgttgatgccctgttgttgcttgccagattgatgcccctgttgcttgcagcttgcaagctgtagtgaaatcctaaaattcgaaaccaaatctattctgaacttttgaagatctgtgatgtccggaagaaaagattcaaacagataaacgggactctccagaatctataaaataaatgatcgacaaacgctttgctttggtaggcttcctagttagttagcggaccgaagcttcggtccgggcctagaaggccagcttcggccgcccctcggtaccctgggatctgcccttactttaacgcctctaaccaacacccctttatctttataaggaacaataaacagaatttgccccactgttctaaatcacctaataatatccccagctaaaaacaataaaggtttcctagaattaagacaagcatgactgttcctccaggagggtttggaacattgttgcagtcttgcagatacgggcgaagggtgagaaacagagcggagggctggaggtgacctcggtagtcgacgccggagttgagcttgacaacgacggggcggcccctgatggacttgaggaagtccgatggcgtcttcaccgtcccgccggcgcccgaggcgggcctgtcgctgccgccgccgccgctgctcatcttgcgcgctgtgcccccggcggtgtccctgtgttgcggatcgcgggtgggccaggtggatgcgagggcgacccgtttggactccggccggagccgccggatccctggtcggtgtcagtgccgtttactctgggccccacgtgtcagtaccgtctgtagatgacaacaacccgtcgtccacagtcatgtccaaaatatcctttcttcttttttttcgattcggatatctatcttccttttttttttccaaaaatcttcttgacgcaccagcgcgcacgtttgtggtaaacgccgacacgtcggtcccacgtcgatagaccccacccaccagtgagtagcgtgtacgtattcgggggtgacggacgtgtcgccgtcgtcttgctagtcccattcccatctgagccacacatctctgaacaaaaaaaaggagggaggcctccacgcacatccccctccgtgccacccgccccaaaccctcgcgccgcctccgagacagccgccgcaaccatggccaccgccgccgccgcgtctaccgcgctcactggcgccactaccgctgcgcccaaggcgaggcgccgggcgcacctcctggccacccgccgcgccctcgccgcgcccatcaggtgctcagcggcgtcacccgccatgccgatggctcccccggccaccccgctccggccgtggggccccaccgagccccgcaagggtgctgacatcctcgtcgagtccctcgagcgctgcggcgtccgcgacgtcttcgcctaccccggcggcgcgtccatggagatccaccaggcactcacccgctcccccgtcatcgccaaccacctcttccgccacgagcaaggggaggcctttgccgcctccggctacgcgcgctcctcgggccgcgtcggcgtctgcatcgccacctccggccccggcgccaccaacctagtctccgcgctcgccgacgcgctgctcgattccgtccccatggtcgccatcacgggacaggtggcgcgacgcatgattggcaccgacgccttccaggagacgcccatcgtcgaggtcacccgctccatcaccaagcacaactacctggtcctcgacgtcgacgacatcccccgcgtcgtgcaggaggctttcttcctcgcctcctctggtcgaccagggccggtgcttgtcgacatccccaaggacatccagcagcagatggcggtgcctgtctgggacaagcccatgagtctgcctgggtacattgcgcgccttcccaagccccctgcgactgagttgcttgagcaggtgctgcgtcttgttggtgaatcgcggcgccctgttctttatgtgggcggtggctgcgcagcatctggtgaggagttgcgacgctttgtggagctgactggaatcccggtcacaactactcttatgggcctcggcaacttccccagcgacgacccactgtctctgcgcatgctaggtatgcatgggacggtgtatgcaaattatgcagtggataaggccgatctgttgcttgcacttggtgtgcggtttgatgatcgcgtgacagggaagattgaggcttttgcaagcagggctaagattgtgcacgttgatattgatccggctgagattggcaagaacaagcagccacatgtgtccatctgtgcagatgttaagcttgctttgcagggcatgaatgctcttcttgaaggaagcacatcaaagaagagctttgactttggctcatggaacgatgagttggatcagcagaagagggaattcccccttgggtataaaacatctaatgaggagatccagccacaatatgctattcaggttcttgatgagctgacgaaaggcgaggccatcatcggcacaggtgttgggcagcaccagatgtgggcggcacagtactacacttacaagcggccaaggcagtggttgtcttcagctggtcttggggctatgggatttggtttgccggctgctgctggtgcttctgtggcaaacccaggtgtcactgttgttgacatcgatggagatggtagctttctcatgaacgttcaggagctagctatgatccgaattgagaacctcccagtgaaggtctttgtgctaaacaaccagcacctggggatggtggtgcagttggaggacaggttctataaggccaacagagcgcacacatacttgggaaacccagagaatgaaagtgagatatatccagatttcgtgacgatcgccaaagggttcaacattccagccgtccgtgtgacaaagaagaacgaagtccgcgcagcgataaagaagatgctcgagactccagggccgtacctcttggatataatcgtcccacaccaggagcatgtgttgcctatgatccctagtggtggggctttcaaggatatgatcctggatggtgatggcaggactgtgtactgacttcgaataggtacccggggatcctctagtgccgtgggtcgtttaagctgccgctgtacctgtgtcgtctggtgccttctggtgtacctgggaggttgtcgtctatcaagtatctgtggttggtgtcatgagtcagtgagtcccaatactgttcgtgtcctgtgtgcattatacccaaaactgttatgggcaaatcatgaataagcttgatgttcgaacttaaaagtctctgctcaatatggtattatggttgtttttgttcgtctcctaatatttgcctgggatcaaattttattggctggtgttcatttgacctccatgttcttgctaggctccattttttactctacagccataatatgtttgattgtttggtttgttctttgttgtacacctggttctgtcgagcttagttttcgacactggcttacagcttaacatgttgctattttattgggttctgattgctattttattgggttctgattgctagtttttgctgaatccaaaaaccatgttatttatttaagcgatccaggttattattatgatggtggctaagtttttttttttccaagggtaaattttctggattctccagtgtttctgtggccgaattcaatcactagagtcgacctgcaaagcttcggtccgggcctagaaggcccgcgccacttacgcttgattccgatgacttcgtaggttcctagctcaagccgctcgtgtccaagcgtcacttacgattagctaatgattacggcatctaggaccgactagttcttatgtgcttctagtctccaaatgtggttgatagttattttgctctaagatcaacagtaatgaagtataaatcatcgttgtggtgtgctactcggttaattgagcattaacacacacaaacatgacgaggatggtataatctccaaaaatgtgtactttgttaggtgggaccctatagccttgattaatgtgctatgttaggcatgcctggaaacgtgtgacgcatatgttttgtgaacctgttgatattatatgtgcttttatattaccatattttattaaaatactaatatttattactagtaagatataacattctatctagcttaaaaactaaccataaatattccataataactagatttaccaaactaatatactaaatatacataataaatacaaaattaacaagacaataatcaatatttatgagcttaatatatttagacattatggttggtcgacgataatcatgctaacttttcgtaattgcttgattgaaatatgcttagaataatgcctctttgttctacatggcaaatagggaccattatggtgtaacaccctgggaaccacaaacaccccgaaatgctactaaactacacaactaaccttcatatataaaatttcgacagcatctcctttgaaaatttgcatagacgtggaagcaacagagtataaacagatctgcgtttaaacgtgcaagcgctactagacaattcagtacattaaaaacgtccgcaatgtgttattaagttgtctaagcgtcaatttgtttacaccacaatatatcctgcca

SEQ ID NO: 164 - DNA, 20892 bp, unidentified
  source 1..20892: mol_type = other DNA; note = Artificial
gtttacccgccaatatatcctgtcaaacactgcggccgcacttgaccgcggatggagccggagctgtggtgaggccatcgacgggaggtgggggagaacacagtctcagtgttctttgtgagtccgcaaggtttttagcttttctgtattaattaaggttgctgttggctgtagaatacggtcgtggaagagctgtatcggtagctactacgtaagctattatatactggaagtctggagctcgtcgatctccggtcgtcttcctccatttctcctcgtcttgctttgactgctgctaccatttgcttctgttttctgatgaagcatgccatgtcggccaccagtgtttgtgtggtttttgcagggaatggctttcaagtgctgtgattgaatggccctcgtcgtcctcggctgagctcacatggacgcgtcatgtgagtgagatatatgatcatatgatgagtggggttcgggtgagtgcgtacttgaagtaggatcccgctttcactcattcattcattggcctttaaaccgggaaattttcgcgaggagatggagggaagcaagcagggtgacgagtgcagagtgccgcgagcgctttgtcaaaaggcaccgccgtaggcaaaaaaatcaatggccctgactgactcgatggtagtactactgtagagactagagagggttgctccccatatcttcgtgtgacttttactccagcattgcatttccgtcattgagacgttaattaatagcagctttcgggacagatgactgtggccatgtttcgtcacggccgcttcgtgccagctgggggtactatagtactgtgattttgttagtaaaaactttcattaggccaccattgacgaccgggccttcgcttttgctgcgctaattaaccatttcccggcgaccgaagggaacatgaacatgccccgacacatgagggcatgaggactagtgttctccctgtcgttcgttgacttgactagtgatagtttaaacgctcttcaactggaagagcggttactaccggttcactagctagctgctaatcgagctagttaccctatgaggtgacatgaagcgctcacggttactatgacggttagcttcacgactgttggtggcagtagcgtacgacttagctatagttccggacttacctagctaataacttcgtatagcatacattatacgaagttatggttaccgccctggccgaagctttccggacttacccttaagcgatttaaatcctgaggcctgcaacactgatagtttaaactgaaggcgggaaacgacaatctgatcatgagcggagaattaagggagtcacgttatgacccccgccgatgacgcgggacaagccgttttacgtttggaactgacagaaccgcaacgattgaaggagccactcagccgcgggtttctggagtttaatgagctaagcacatacgtcagaaaccattattgcgcgttcaaaagtcgcctaaggtcactatcagctagcaaatatttcttgtcaaaaatgctccactgacgttccataaattcccctcggtatccaattagagtctcatattcactcccatggcggccaatgcgggcggcggtggagcgggaggaggcagcggcagcggcagcgtggctgcgccggcggtgtgccgccccagcggctcgcggtggacgccgacgccggagcagatcaggatgctgaaggagctctactacggctgcggcatccggtcgcccagctcggagcagatccagcgcatcaccgccatgctgcggcagcacggcaagatcgagggcaagaacgtcttctactggttccagaaccacaaggcccgcgagcgccagaagcgccgcctcaccagcctcgacgtcaacgtgcccgccgccggcgcggccgacgccaccaccagccaactcggcgtcctctcgctgtcgtcgccgccgccttcaggcgcggcgcctccctcgcccaccctcggcttctacgccgccggcaatggcggcggatcggctgtgctgctggacacgagttccgactggggcagcagcggcgctgctatggccaccgagacatgcttcctgcaggactacatgggcgtgacggacacgggcagctcgtcgcagtggccacgcttctcgtcgtcggacacgataatggcggcggccgcggcgcgggcggcgacgacgcgggcgcccgagacgctccctctcttcccgacctgcggcgacgacggcggcagcggtagcagcagctacttgccgttctggggtgccgcgtccacaactgccggcgccacttcttccgttgcgatccaacagcaacaccagctgcaggagcagtacagcttttacagcaacagcaacagcacccagctggccggcaccggcaaccaagacgtatcggcaacagcagcagcagccgccgccctggagctgagcctcagctcatggtgctccccttaccctgctgcagggagtatgtgagagcaacgcgagctgccactgctcttcactgatgtctctggaatggaaggaggaggaagtgagaacagatcattcgacaaagcagcattagtccgttgatcggtggaagaccactcgtcagtgttgagttgaatgtttgatcaataaaatacggcaatgctgtaagggttgttttttatgccattgataatacactgtactgttcagttgttgaactctatttcttagccatgccaagtgcttttcttattttgaataacattacagcaaaaagttgaaagacaaaaaaaaaaacccccgaacagagtgctttgggtcccaagcttctttagactgtgttcggcgttccccctaaatttctccccctatatctcactcacttgtcacatcagcgttctctttccccctatatctccacgctctacagcagttccacctatatcaaacctctataccccaccacaacaatattatatactttcatcttcaactaactcatgtaccttccaatttttttctactaataattatttacgtgcacagaaacttagcaaggagagagagagcgggaatttaaatgctcggcgttaggcttttagtccgctaggtggctagaccgaggttaggacgctagttcactaggggcctagtggtgttttaagacgtcacggtcaccgcggccgcatcgagcagctggcttgtggggaccagacaaaaaaggaatggtgcagaattgttaggcgcacctaccaaaagcatctttgcctttattgcaaagataaagcagattcctctagtacaagtggggaacaaaataacgtggaaaagagctgtcctgacagcccactcactaatgcgtatgacgaacgcagtgacgaccacaaaactcgagcaacgagatcatgagccaatcaaagaggagtgatgtagacctaaagcaataatggagccatgacgtaagggcttacgcccatacgaaataattaaaggctgatgtgacctgtcggtctctcagaacctttactttttatgtttggcgtgtatttttaaatttccacggcaatgacgatgtgaccgtcgacccactaaaacattgctttgtcaaaagctaaaaaagatgatgcccgacagccacttgtgtgaagcatgagaagccggtccctccactaagaaaattagtgaagcatcttccagtggtccctccactcacagctcaatcagtgagcaacaggacgaaggaaatgacgtaagccatgacgtctaatcccattcgaaacgcgtggaccgaagcttgcatgcctgcagtgcagcgtgacccggtcgtgcccctctctagagataatgagcattgcatgtctaagttataaaaaattaccacatattttttttgtcacacttgtttgaagtgcagtttatctatctttatacatatatttaaactttactctacgaataatataatctatagtactacaataatatcagtgttttagagaatcatataaatgaacagttagacatggtctaaaggacaattgagtattttgacaacaggactctacagttttatctttttagtgtgcatgtgttctcctttttttttgcaaatagcttcacctatataatacttcatccattttattagtacatccatttagggtttagggttaatggtttttatagactaatttttttagtacatctattttattctattttagcctctaaattaagaaaactaaaactctattttagtttttttatttaataatttagatataaaatagaataaaataaagtgactaaaaattaaacaaataccctttaagaaattaaaaaaactaaggaaacatttttcttgtttcgagtagataatgccagcctgttaaacgccgtcgacgagtctaacggacaccaaccagcgaaccagcagcgtcgcgtcgggccaagcgaagcagacggcacggcatctctgtcgctgcctctggacccctctcgagagttccgctccaccgttggacttgctccgctgtcggcatccagaaattgcgtggcggagcggcagacgtgagccggcacggcaggcggcctcctcctcctctcacggcaccggcagctacgggggattcctttcccaccgctccttcgctttcccttcctcgcccgccgtaataaatagacaccccctccacaccctctttccccaacctcgtgttgttcggagcgcacacacacacaaccagatctcccccaaatccacccgtcggcacctccgcttcaaggtacgccgctcgtcctcccccccccccctctctaccttctctagatcggcgttccggtccatgcatggttagggcccggtagttctacttctgttcatgtttgtgttagatccgtgtttgtgttagatccgtgctgctagcgttcgtacacggatgcgacctgtacgtcagacacgttctgattgctaacttgccagtgtttctctttggggaatcctgggatggctctagccgttccgcagacgggatcgatttcatgattttttttgtttcgttgcatagggtttggtttgcccttttcctttatttcaatatatgccgtgcacttgtttgtcgggtcatcttttcatgcttttttttgtcttggttgtgatgatgtggtctggttgggcggtcgttctagatcggagtagaattctgtttcaaactacctggtggatttattaattttggatctgtatgtgtgtgccatacatattcatagttacgaattgaagatgatggatggaaatatcgatctaggataggtatacatgttgatgcgggttttactgatgcatatacagagatgctttttgttcgcttggttgtgatgatgtggtgtggttgggcggtcgttcattcgttctagatcggagtagaatactgtttcaaactacctggtgtatttattaattttggaactgtatgtgtgtgtcatacatcttcatagttacgagtttaagatggatggaaatatcgatctaggataggtatacatgttgatgtgggttttactgatgcatatacatgatggcatatgcagcatctattcatatgctctaaccttgagtacctatctattataataaacaagtatgttttataattattttgatcttgatatacttggatgatggcatatgcagcagctatatgtggatttttttagccctgccttcatacgctatttatttgcttggtactgtttcttttgtcgatgctcaccctgttgtttggtgttacttctgcaggtcgactttaacttagcctaggatccatggccactgtgaacaactggctcgctttctccctctccccgcaggagctgccgccctcccagacgacggactccacactcatctcggccgccaccgccgaccatgtctccggcgatgtctgcttcaacatcccccaagattggagcatgaggggatcagagctttcggcgctcgtcgcggagccgaagctggaggacttcctcggcggcatctccttctccgagcagcatcacaaggccaactgcaacatgatacccagcactagcagcacagtttgctacgcgagctcaggtgctagcaccggctaccatcaccagctgtaccaccagcccaccagctcagcgctccacttcgcggactccgtaatggtggcttcctcggccggtgtccacgacggcggtgccatgctcagcgcggccgccgctaacggtgtcgctggcgctgccagtgccaacggcggcggcatcgggctgtccatgattaagaactggctgcggagccaaccggcgcccatgcagccgagggtggcggcggctgagggcgcgcaggggctctctttgtccatgaacatggcggggacgacccaaggcgctgctggcatgccacttctcgctggagagcgcgcacgggcgcccgagagtgtatcgacgtcagcacagggtggagccgtcgtcgtcacggcgccgaaggaggatagcggtggcagcggtgttgccggcgctctagtagccgtgagcacggacacgggtggcagcggcggcgcgtcggctgacaacacggcaaggaagacggtggacacgttcgggcagcgcacgtcgatttaccgtggcgtgacaaggcatagatggactgggagatatgaggcacatctttgggataacagttgcagaagggaagggcaaactcgtaagggtcgtcaagtctatttaggtggctatgataaagaggagaaagctgctagggcttatgatcttgctgctctgaagtactggggtgccacaacaacaacaaattttccagtgagtaactacgaaaaggagctcgaggacatgaagcacatgacaaggcaggagtttgtagcgtctctgagaaggaagagcagtggtttctccagaggtgcatccatttacaggggagtgactaggcatcaccaacatggaagatggcaagcacggattggacgagttgcagggaacaaggatctttacttgggcaccttcagcacccaggaggaggcagcggaggcgtacgacatcgcggcgatcaagttccgcggcctcaacgccgtcaccaacttcgacatgagccgctacgacgtgaagagcatcctggacagcagcgccctccccatcggcagcgccgccaagcgcctcaaggaggccgaggccgcagcgtccgcgcagcaccaccacgccggcgtggtgagctacgacgtcggccgcatcgcctcgcagctcggcgacggcggagccctggcggcggcgtacggcgcgcactaccacggcgccgcctggccgaccatcgcgttccagccgggcgccgccagcacaggcctgtaccacccgtacgcgcagcagccaatgcgcggcggcgggtggtgcaagcaggagcaggaccacgcggtgatcgcggccgcgcacagcctgcaggacctccaccacctgaacctgggcgcggccggcgcgcacgactttttctcggcagggcagcaggccgccgccgctgcgatgcacggcctgggtagcatcgacagtgcgtcgctcgagcacagcaccggctccaactccgtcgtctacaacggcggggtcggcgacagcaacggcgccagcgccgtcggcggcagtggcggtggctacatgatgccgatgagcgctgccggagcaaccactacatcggcaatggtgagccacgagcaggtgcatgcacgggcctacgacgaagccaagcaggctgctcagatggggtacgagagctacctggtgaacgcggagaacaatggtggcggaaggatgtctgcatgggggactgtcgtgtctgcagccgcggcggcagcagcaagcagcaacgacaacatggccgccgacgtcgggcatggcggcgcgcagctcttcagtgtctggaacgacacttaagcgtacctagtggtacctgacatcttatagtctgcaacctctcgtgtctgaattcctatctttatcaagtgttattgcttccacgactataggacagctttcgtcgaaagcttttgctcatgtgatctcgaaggattcatctagtctgatttttcgtgacttgtatcggttttattggattcatccaacatatatcaataaaaaatgagttgtgtttcctttcttcctagttcagttaaaattatttccctcctgcgcttgtgctgtaattgtctgtgtacctgttgtttgtgactgtgttagttcccttggatatgatttcgtatttgatatgtacatggagatagcttagcttcattattggagtatgaagttagtatgacatagtcactctcctggaaaattgacactgcaaaccatatttttattctgaaccacaaatcctagtcagtccgctggcatatgccgtccgtttgctgaatccagaacgtgggtttggagatgtacggctgagatgcctctatgcgaaggggatttcgtggtgaaacgagatgggagtagagcaacgcccgtggaagatgcttcaaacttccacacttttgagcaacgatcggcagtagtaaggtagacgatttcaagatcaaagcatatgaagataaacaacatcaacaacaaaatttgttggggttctatagagagaaacagagctacatacatacactgttttgtatctaccatctgagatgatgaaaagatgaaaaactaaagaatgccccggcgccaacgccaggacacgccgcgcgcgcgtcacccgagccatctcttgacccagccggcgctgtatatttacacacgttgcagcatcgatcaccacctgttcgatcgcgtcgccgtcaccggcgcgccgcgacttattgaactagtctagggcgcggctaacaacctagcttagattgccttgtctaaacccttaggctaacgcgccactctagaaggccgatctccccgggtttaccgagctcacaaaaaaacacggcccaagcccaaacctgccacagctcggcccaatcaacacaccaaccgatgtgagtcttggccggctggttggtgggacccggcggacagcgtcgccaggctgtgttcccccaccctctagaggttcacaaactcaatacaacacacagtggagtagggtattacgctccggcggcccgaaccactctaaatccttgtgtcctcgtgtgctcttccaccattaatgactgtaattgcagggacacgaagagttgtagcgcttttgccaacaagatccgctatatgctagtagagtggaacctgcacagcaacaagcatccaataatctgagaataagaattatgtgtggtgatggttctcatctctgcaactcgccattttcgcgagagaaccaaatccaagttggtgaagatcatgatttgggctcatgggctggcatagtagctattacctttgcaattgtggttcgaatctatccgatattctccttttcagggagagctaatgcttatgcttattgggtattttggtttgacactgcttcacgcccaaaaaaaggcaactatgtctgagttggatatggcccaaaaaaaggcagctatgtctgagttggatatggaagtcttctttcgtttagggtgaagtaagaccaagctcatgagcttattatcttaggtcggaacaaattagttgataggcatggcacatttatcaaattataatgattttaacagaaaagcaacacctctttttcagcagcaccagctttgcaagctgcaattgacactccaagcatagtatttgctccaaactcagcctgcatttcgcacaatatcatatctatttccatttggataaaatatattttccagaaatatgggaacagaatcaagatacagaaaaaagttgtggtagtagtggtaagtggaaacacaagtacagtgaaaagatagcattatttctgaacagtcaaattaaccgaaataagtagtatcacatactgcccctaaattgactacacccaatgtaaagaattgcttgagcatattgagccatcagttgtttgtttgtgtaacggatttgacaatgcagagttcaggagcaaaaaaccgcaaaggagagaaagagggaaaggatctcctagtatcccaccttgtggcgcgccctgtcaagtgcatgatggcctggtcgatctgcgtctgctgctgcggttccatcccaacgagtgcctccgacaccttgtcgttgatcacccgcaccgcgtaggcgacccccctggcgaggaacttccgcctctcggaggccccggccgcgtcggcggcggcgccctcgagcgcgcccacgctagccgtagatgctcggtgcacggccttgttggtgtgcaactcgacctcaacggccggtgcgctacgcccgtcaaggatctggcgcgcccgcaccctcgtgatcacggtgggcgcctcccgcctcatgtggccgacgatgaaaagcgccgggttaggggccttggcgcgcaccgccgtattcagggcctcctcgctcttgcgcgagagcaggtgcttccccaggtactcctgcactgacaaggctgccacagcggtggaatttgtcctcacgacttcgccacgtcgtcctcacctccctggcttcccacgactccgccgtatcgaggtgctcggtgggtcgtcttaatccgaagtccgaactaggaagacgagacagagaggtctgaggaatgggcctcgtttgatgttgagctgaattatttttccagcataagcccaggtcttggtccatgaacaaaattactagaaacccagcccagtactacgatctaaaagagggactgccactggatagctctctctagcattctccacgctccaatacagcggcgtcgtgtctatccgggtctatccgcgaacacgtgagaactctccagaaactgctttctcctccacttcatctctctcgctttccctctataaaaagaccccttctaggaattgagggagacagcaagcaccaagcagcgatccgaagctcaatcaattcactcaaacctcttccccaaatcttcgattagatcttcgttgacaagaagactagaaccgaacctgacatgtccaacctgctcacggttcaccagaaccttccggctcttccagtggacgcgacgtccgatgaagtcaggaagaacctcatggacatgttccgcgacaggcaagcgttcagcgagcacacctggaagatgctgctctccgtctgccgctcctgggctgcatggtgcaagctgaacaacaggaagtggttccccgctgagcccgaggacgtgagggattaccttctgtacctgcaagcgcgaggtttgtttctgcttctacctttgatatatatataataattatcattaattagtagtaatataatatttcaaatatttttttcaaaataaaagaatgtagtatatagcaattgcttttctgtagtttataagtgtgtatattttaatttataacttttctaatatatgaccaaaacatggtgatgcctaggtctggcagtgaagaccatccagcaacaccttggacaactgaacatgcttcacaggcgctccggcctcccgcgccccagcgactcgaacgccgtgagcctcgtcatgcgccgcatcaggaaggaaaacgtcgatgccggcgaaagggcaaagcaggccctcgcgttcgagaggaccgatttcgaccaggtccgcagcctgatggagaacagcgacaggtgccaggacattaggaacctggcgttcctcggaattgcatacaacacgctcctcaggatcgcggaaattgcccgcattcgcgtgaaggacattagccgcaccgacggcggcaggatgcttatccacattggcaggaccaagacgctcgtttccaccgcaggcgtcgaaaaggccctcagcctcggagtgaccaagctcgtcgaacgctggatctccgtgtccggcgtcgcggacgacccaaacaactacctcttctgccgcgtccgcaagaacggggtggctgcccctagcgccaccagccaactcagcacgagggccttggaaggtattttcgaggccacccaccgcctgatctacggcgcgaaggatgacagcggtcaacgctacctcgcatggtccgggcactccgcccgcgttggagctgctagggacatggcccgcgccggtgtttccatccccgaaatcatgcaggcgggtggatggacgaacgtgaacattgtcatgaactacattcgcaaccttgacagcgagacgggcgcaatggttcgcctcctggaagatggtgactgaggtacccaacctagacttgtccatcttctggattggccaacttaattaatgtatgaaataaaaggatgcacacatagtgacatgctaatcactataatgtgggcatcaaagttgtgtgttatgtgtaattactagttatctgaataaaagagaaagagatcatccatatttcttatcctaaatgaatgtcacgtgtctttataattctttgatgaaccagatgcatttcattaaccaaatccatatacatataaatattaatcatatataattaatatcaattgggttagcaaaacaaatctagtctaggtgtgttttgcgatccgataatcgatgggtctaaaaacggcccctaactaacgcttagttgcccgctagattagtcccccgttagtgcctagttagacacacgacgaactaggggctagcacgcgttagataacttcgtatagcatacattatacgaagttattccggaccgggttaccgaattcaattcctgcccttaaggccaattgttcaagattcattcaacaattgaaacatctcccatgattaaatcagtataaggttgctatggtcttgcttgacaaagtttttttttgagggaatttcaactaaatttttgagtgaaactatcaaatactgattttaaaaaatttttataaaaggaagcgcagagataaaaggccatctatgctacaaaagtacccaaaaatgtaatcctaaagtatgaattgcattttttttttgtttggacgaaaggaaaggagtattaccacaagaatgatatcatcttcatatttagatcttttttgggtaaagcttgagattctctaaatatagagaaatcagaagaaaaaaaaaccgtgttttggtggttttgatttctagcctccacaataactttgacggcgtcgacaagtctaacggacaccaagcagcgaaccaccagcgccgagccaagcgaagcagacggccgagacgttgacaccttcggcgcggcatctctcgagagttccgctccggcgctccacctccaccgctggcggtttcttattccgttccgttccgcctcctgctctgctcctctccacaccacacggcacgaaaccgttacggcaccggcagcacccagcacgggagaggggattcctttcccaccgttccttccctttccgccccgccgctataaatagccagccccatccccagcttttttccccaatctcatctcctctctcctgttgttcggagcacacgcacaatccgatcgatccccaaatccccttcgtctctcctcgcgagcctcgtggatcccagcttcaaggtacggcgatcgatcatcccccctccttctctctaccttcttttctctagactacatcggatggcgatccatggttagggcctgctagtttcccttcctgttttgtcgatggctgcgaggcacaatagatctgatggcgttatgacggctaacttgtcatgttgttgcgatttatagtccctttaggagatcagtttaatttctcggatggttcgagatcggtggtccatggttagtaccctaagatccgcgctgttagggttcgtagatggaggcgacctgttctgattgttaacttgtcagtacctgggaaatcctgggatggttctagctcgtccgcagatgagatcgatttcatgatcctctgtatcttgtttcgttgcctaggttccgtctaatctatccgtggtatgatgtagatgttttgatcgtgctaactacgtcttgtaaagttaattgtcaggtcataatttttagcatgcctttttttttgtttggttttgtctaattgggctgtcgttctagatcagagtagaagactgttccaaactacctgctggatttattgaacttggatctgtatgtgtgtcacatatcttcataaattcatgattaagatggattgaaatatcttttatctttttggtatggatagttctatatgttggtgtggctttgttagatgtatacatgcttagatacatgaagcaacgtgctgctactgtttagtaattgctgttcatttgtctaataaacagataaggatatgtatttatgttgctgttggttttgctggtactttgttggatacaaatgcttcaatacagaaaacagcatgctgctacgatttaccatttatctaatcttatcatatgtctaatctaataaacaaacatgcttttaaattatcttcatatgcttggatgatggcatacacagcggctatgtgtggttttttaaatacccagcatcatgggcatgcatgacactgctttaatatgctttttatttgcttgagactgtttcttttgtttatactgaccctttagttcggtgactcttctgcaggtcgactttaacttagcctaggatccatggcccagtccaagcacggcctgaccaaggagatgaccatgaagtaccgcatggagggctgcgtggacggccacaagttcgtgatcaccggcgagggcatcggctaccccttcaagggcaagcaggccatcaacctgtgcgtggtggagggcggccccttgcccttcgccgaggacatcttgtccgccgccttcatgtacggcaaccgcgtgttcaccgagtacccccaggacatcgtcgactacttcaagaactcctgccccgccggctacacctgggaccgctccttcctgttcgaggacggcgccgtgtgcatctgcaacgccgacatcaccgtgagcgtggaggagaactgcatgtaccacgagtccaagttctacggcgtgaacttccccgccgacggccccgtgatgaagaagatgaccgacaactgggagccctcctgcgagaagatcatccccgtgcccaagcagggcatcttgaagggcgacgtgagcatgtacctgctgctgaaggacggtggccgcttgcgctgccagttcgacaccgtgtacaaggccaagtccgtgccccgcaagatgcccgactggcacttcatccagcacaagctgacccgcgaggaccgcagcgacgccaagaaccagaagtggcacctgaccgagcacgccatcgcctccggctccgccttgccctccggactcagatctcgatagggtaccaatggccagttaacagatccagctgctgctgttctagggttcacaagtctgcctatttgtcttccccaatggagctatggttgtctggtctggtccttggtcgtgtcccgtttcattgtgtactatttacctgtaatgtgtatccttaagtctggtttgatggtgtctgaaacgttttgctgtggtagagcagcatggaagaactataatgaataagtgatccctaatcattgtgtccaaattttgcttctgctatacccttttgtgctgtttcttatgttttgcttaaaaatttgatctgacaaacaaatttgtctaaattatgctcttgttctgactgtgtactgtacacatttgtattgctaccggtttggcacatagttttctctttgattgcagatcaaacccttctgattgcagattgcttggctatggctgatgtgctcactgttcttctttagcttgtatattgctgatggtggcttggctacggctgaaaaagttgctgctgcgccgacttggcaactgttgctccagtaatgctttgtcctctcttcctagccgccgacttggcacttggcagctgttgctcctgtaatgcgttgttatctcttatctcttgagatgtactatgattttgaggctgtttgacttgtgccagattgccagtgctgatgctatattatctcaggtttttatgctagtatatgttttactgtgtgctgcctgtgtcgagttacgtaatctattgaaccgctatgcgtgttgatgccctgttgttgcttgccagattgatgcccctgttgcttgcagcttgcaagctgtagtgaaatcctaaaattcgaaaccaaatctattctgaacttttgaagatctgtgatgtccggaagaaaagattcaaacagataaacgggactctccagaatctataaaataaatgatcgacaaacgctttgctttggtaggcttcctagttagttagcggaccgaagcttcggtccgggcctagaaggccagcttcggccgcccctcggtaccctgggatctgcccttactttaacgcctctaaccaacacccctttatctttataaggaacaataaacagaatttgccccactgttctaaatcacctaataatatccccagctaaaaacaataaaggtttcctagaattaagacaagcatgactgttcctccaggagggtttggaacattgttgcagtcttgcagatacgggcgaagggtgagaaacagagcggagggctggaggtgacctcggtagtcgacgccggagttgagcttgacaacgacggggcggcccctgatggacttgaggaagtccgatggcgtcttcaccgtcccgccggcgcccgaggcgggcctgtcgctgccgccgccgccgctgctcatcttgcgcgctgtgcccccggcggtgtccctgtgttgcggatcgcgggtgggccaggtggatgcgagggcgacccgtttggactccggccggagccgccggatccctggtcggtgtcagtgccgtttactctgggccccacgtgtcagtaccgtctgtagatgacaacaacccgtcgtccacagtcatgtccaaaatatcctttcttcttttttttcgattcggatatctatcttccttttttttttccaaaaatcttcttgacgcaccagcgcgcacgtttgtggtaaacgccgacacgtcggtcccacgtcgatagaccccacccaccagtgagtagcgtgtacgtattcgggggtgacggacgtgtcgccgtcgtcttgctagtcccattcccatctgagccacacatctctgaacaaaaaaaaggagggaggcctccacgcacatccccctccgtgccacccgccccaaaccctcgcgccgcctccgagacagccgccgcaaccatggccaccgccgccgccgcgtctaccgcgctcactggcgccactaccgctgcgcccaaggcgaggcgccgggcgcacctcctggccacccgccgcgccctcgccgcgcccatcaggtgctcagcggcgtcacccgccatgccgatggctcccccggccaccccgctccggccgtggggccccaccgagccccgcaagggtgctgacatcctcgtcgagtccctcgagcgctgcggcgtccgcgacgtcttcgcctaccccggcggcgcgtccatggagatccaccaggcactcacccgctcccccgtcatcgccaaccacctcttccgccacgagcaaggggaggcctttgccgcctccggctacgcgcgctcctcgggccgcgtcggcgtctgcatcgccacctccggccccggcgccaccaacctagtctccgcgctcgccgacgcgctgctcgattccgtccccatggtcgccatcacgggacaggtggcgcgacgcatgattggcaccgacgccttccaggagacgcccatcgtcgaggtcacccgctccatcaccaagcacaactacctggtcctcgacgtcgacgacatcccccgcgtcgtgcaggaggctttcttcctcgcctcctctggtcgaccagggccggtgcttgtcgacatccccaaggacatccagcagcagatggcggtgcctgtctgggacaagcccatgagtctgcctgggtacattgcgcgccttcccaagccccctgcgactgagttgcttgagcaggtgctgcgtcttgttggtgaatcgcggcgccctgttctttatgtgggcggtggctgcgcagcatctggtgaggagttgcgacgctttgtggagctgactggaatcccggtcacaactactcttatgggcctcggcaacttccccagcgacgacccactgtctctgcgcatgctaggtatgcatgggacggtgtatgcaaattatgcagtggataaggccgatctgttgcttgcacttggtgtgcggtttgatgatcgcgtgacagggaagattgaggcttttgcaagcagggctaagattgtgcacgttgatattgatccggctgagattggcaagaacaagcagccacatgtgtccatctgtgcagatgttaagcttgctttgcagggcatgaatgctcttcttgaaggaagcacatcaaagaagagctttgactttggctcatggaacgatgagttggatcagcagaagagggaattcccccttgggtataaaacatctaatgaggagatccagccacaatatgctattcaggttcttgatgagctgacgaaaggcgaggccatcatcggcacaggtgttgggcagcaccagatgtgggcggcacagtactacacttacaagcggccaaggcagtggttgtcttcagctggtcttggggctatgggatttggtttgccggctgctgctggtgcttctgtggcaaacccaggtgtcactgttgttgacatcgatggagatggtagctttctcatgaacgttcaggagctagctatgatccgaattgagaacctcccagtgaaggtctttgtgctaaacaaccagcacctggggatggtggtgcagttggaggacaggttctataaggccaacagagcgcacacatacttgggaaacccagagaatgaaagtgagatatatccagatttcgtgacgatcgccaaagggttcaacattccagccgtccgtgtgacaaagaagaacgaagtccgcgcagcgataaagaagatgctcgagactccagggccgtacctcttggatataatcgtcccacaccaggagcatgtgttgcctatgatccctagtggtggggctttcaaggatatgatcctggatggtgatggcaggactgtgtactgacttcgaataggtacccggggatcctctagtgccgtgggtcgtttaagctgccgctgtacctgtgtcgtctggtgccttctggtgtacctgggaggttgtcgtctatcaagtatctgtggttggtgtcatgagtcagtgagtcccaatactgttcgtgtcctgtgtgcattatacccaaaactgttatgggcaaatcatgaataagcttgatgttcgaacttaaaagtctctgctcaatatggtattatggttgtttttgttcgtctcctaatatttgcctgggatcaaattttattggctggtgttcatttgacctccatgttcttgctaggctccattttttactctacagccataatatgtttgattgtttggtttgttctttgttgtacacctggttctgtcgagcttagttttcgacactggcttacagcttaacatgttgctattttattgggttctgattgctattttattgggttctgattgctagtttttgctgaatccaaaaaccatgttatttatttaagcgatccaggttattattatgatggtggctaagtttttttttttccaagggtaaattttctggattctccagtgtttctgtggccgaattcaatcactagagtcgacctgcaaagcttcggtccgggcctagaaggcccgcgccacttacgcttgattccgatgacttcgtaggttcctagctcaagccgctcgtgtccaagcgtcacttacgattagctaatgattacggcatctaggaccgactagttcttatgtgcttctagtctccaaatgtggttgatagttattttgctctaagatcaacagtaatgaagtataaatcatcgttgtggtgtgctactcggttaattgagcattaacacacacaaacatgacgaggatggtataatctccaaaaatgtgtactttgttaggtgggaccctatagccttgattaatgtgctatgttaggcatgcctggaaacgtgtgacgcatatgttttgtgaacctgttgatattatatgtgcttttatattaccatattttattaaaatactaatatttattactagtaagatataacattctatctagcttaaaaactaaccataaatattccataataactagatttaccaaactaatatactaaatatacataataaatacaaaattaacaagacaataatcaatatttatgagcttaatatatttagacattatggttggtcgacgataatcatgctaacttttcgtaattgcttgattgaaatatgcttagaataatgcctctttgttctacatggcaaatagggaccattatggtgtaacaccctgggaaccacaaacaccccgaaatgctactaaactacacaactaaccttcatatataaaatttcgacagcatctcctttgaaaatttgcatagacgtggaagcaacagagtataaacagatctgcgtttaaacgtgcaagcgctactagacaattcagtacattaaaaacgtccgcaatgtgttattaagttgtctaagcgtcaatttgtttacaccacaatatatcctgcca

SEQ ID NO: 165 - DNA, 19 bp, Zea mays
  source 1..19: mol_type = other DNA
cggccaccagggggcgccg

SEQ ID NO: 166 - DNA, 106 bp, Zea mays
  source 1..106: mol_type = other DNA
cggccaccagggggcgccgaaggactcgacggccaccagggggcgccgaccgctccttcggccaccagggggcgccggtccaaaacacggccaccagggggcgccg

SEQ ID NO: 167 - DNA, 19 bp, Zea mays
  source 1..19: mol_type = other DNA
cggccagcagggggcaccg

SEQ ID NO: 168 - DNA, 106 bp, Zea mays
  source 1..106: mol_type = other DNA
cggccagcagggggcaccgaaggactcgacggccagcagggggcaccgaccgctccttcggccagcagggggcaccggtccaaaacacggccagcagggggcaccg

SEQ ID NO: 169 - DNA, 19 bp, Zea mays
  source 1..19: mol_type = other DNA
tggccagcaggtggcagca

SEQ ID NO: 170 - DNA, 106 bp, Zea mays
  source 1..106: mol_type = other DNA
tggccagcaggtggcagcaaaggactcgatggccagcaggtggcagcaaccgctcctttggccagcaggtggcagcagtccaaaacatggccagcaggtggcagca

SEQ ID NO: 171 - DNA, 19 bp, Zea mays
  source 1..19: mol_type = other DNA
tagccagcagggggcacca

SEQ ID NO: 172 - DNA, 106 bp, Zea mays
  source 1..106: mol_type = other DNA
tagccagcagggggcaccaaaggactcgatagccagcagggggcaccaaccgctcctttagccagcagggggcaccagtccaaaacatagccagcagggggcacca

SEQ ID NO: 173 - DNA, 19 bp, Zea mays
  source 1..19: mol_type = other DNA
tcgccagcagggggcggcg

SEQ ID NO: 174 - DNA, 106 bp, Zea mays
  source 1..106: mol_type = other DNA
tcgccagcagggggcggcgaaggactcgatcgccagcagggggcggcgaccgctcctttcgccagcagggggcggcggtccaaaacatcgccagcagggggcggcg

SEQ ID NO: 175 - DNA, 19 bp, Arabidopsis thaliana
  source 1..19: mol_type = other DNA
gcaccaccagggggcactc

SEQ ID NO: 176 - DNA, 106 bp, Arabidopsis thaliana
  source 1..106: mol_type = other DNA
gcaccaccagggggcactcaaggactcgagcaccaccagggggcactcaccgctccttgcaccaccagggggcactcgtccaaaacagcaccaccagggggcactc

SEQ ID NO: 177 - DNA, 19 bp, Arabidopsis thaliana
  source 1..19: mol_type = other DNA
cgaccagaagatggcggtg

SEQ ID NO: 178 - DNA, 106 bp, Arabidopsis thaliana
  source 1..106: mol_type = other DNA
cgaccagaagatggcggtgaaggactcgacgaccagaagatggcggtgaccgctccttcgaccagaagatggcggtggtccaaaacacgaccagaagatggcggtg

SEQ ID NO: 179 - DNA, 19 bp, Arabidopsis thaliana
  source 1..19: mol_type = other DNA
tggacacaagggggcgccc

SEQ ID NO: 180 - DNA, 106 bp, Arabidopsis thaliana
  source 1..106: mol_type = other DNA
tggacacaagggggcgcccaaggactcgatggacacaagggggcgcccaccgctcctttggacacaagggggcgcccgtccaaaacatggacacaagggggcgccc

SEQ ID NO: 181 - DNA, 19 bp, Arabidopsis thaliana
  source 1..19: mol_type = other DNA
gagccagcagagggcgcaa

SEQ ID NO: 182 - DNA, 106 bp, Arabidopsis thaliana
  source 1..106: mol_type = other DNA
gagccagcagagggcgcaaaaggactcgagagccagcagagggcgcaaaccgctccttgagccagcagagggcgcaagtccaaaacagagccagcagagggcgcaa

SEQ ID NO: 183 - DNA, 19 bp, Arabidopsis thaliana
  source 1..19: mol_type = other DNA
tcaccagcagatggcacaa

SEQ ID NO: 184 - DNA, 106 bp, Arabidopsis thaliana
  source 1..106: mol_type = other DNA
tcaccagcagatggcacaaaaggactcgatcaccagcagatggcacaaaccgctcctttcaccagcagatggcacaagtccaaaacatcaccagcagatggcacaa

SEQ ID NO: 185 - DNA, 19 bp, Glycine max
  source 1..19: mol_type = other DNA
cggccagcaggtggcggca

SEQ ID NO: 186 - DNA, 106 bp, Glycine max
  source 1..106: mol_type = other DNA
cggccagcaggtggcggcaaaggactcgacggccagcaggtggcggcaaccgctccttcggccagcaggtggcggcagtccaaaacacggccagcaggtggcggca

SEQ ID NO: 187 - DNA, 19 bp, Glycine max
  source 1..19: mol_type = other DNA
ccaccaccagggggcacta

SEQ ID NO: 188 - DNA, 106 bp, Glycine max
  source 1..106: mol_type = other DNA
ccaccaccagggggcactaaaggactcgaccaccaccagggggcactaaccgctccttccaccaccagggggcactagtccaaaacaccaccaccagggggcacta

SEQ ID NO: 189 - DNA, 19 bp, Glycine max
  source 1..19: mol_type = other DNA
tgcccaccagggggcggtg

SEQ ID NO: 190 - DNA, 106 bp, Glycine max
  source 1..106: mol_type = other DNA
tgcccaccagggggcggtgaaggactcgatgcccaccagggggcggtgaccgctcctttgcccaccagggggcggtggtccaaaacatgcccaccagggggcggtg

SEQ ID NO: 191 - DNA, 19 bp, Glycine max
  source 1..19: mol_type = other DNA
cgtccagcagggggcagca

SEQ ID NO: 192 - DNA, 106 bp, Glycine max
  source 1..106: mol_type = other DNA
cgtccagcagggggcagcaaaggactcgacgtccagcagggggcagcaaccgctccttcgtccagcagggggcagcagtccaaaacacgtccagcagggggcagca

SEQ ID NO: 193 - DNA, 19 bp, Glycine max
  source 1..19: mol_type = other DNA
tgcccaccaggtggcggtg

SEQ ID NO: 194 - DNA, 106 bp, Glycine max
  source 1..106: mol_type = other DNA
tgcccaccaggtggcggtgaaggactcgatgcccaccaggtggcggtgaccgctcctttgcccaccaggtggcggtggtccaaaacatgcccaccaggtggcggtg

SEQ ID NO: 195 - DNA, 36 bp, Arabidopsis thaliana
  source 1..36: mol_type = other DNA
tcgcggtctctggttcgctggttataacaaaccggg

SEQ ID NO: 196 - DNA, 36 bp, Arabidopsis thaliana
  source 1..36: mol_type = other DNA
aggagcttaccgcttcgcagcggcaaacagaaggag

SEQ ID NO: 197 - DNA, 36 bp, Arabidopsis thaliana
  source 1..36: mol_type = other DNA
acgaggttagctcgtggctgccaagggcggaacgga

SEQ ID NO: 198 - DNA, 36 bp, Arabidopsis thaliana
  source 1..36: mol_type = other DNA
tcgaggatcttgcttagttgcttctgacataacgcg

SEQ ID NO: 199 - DNA, 36 bp, Arabidopsis thaliana
  source 1..36: mol_type = other DNA
cagaagtcgcctccgtgctgggaatgtcaacacggg

SEQ ID NO: 200 - DNA, 36 bp, Zea mays
  source 1..36: mol_type = other DNA
tccaggtaagcgcagcgcagcaagcgacaaaccagg

SEQ ID NO: 201 - DNA, 36 bp, Zea mays
  source 1..36: mol_type = other DNA
tcgcggcagccgctgctctgacagagacaaaacagg

SEQ ID NO: 202 - DNA, 36 bp, Zea mays
  source 1..36: mol_type = other DNA
tcgcggcagccgctggtctgacagagacaaaacggg

SEQ ID NO: 203 - DNA, 36 bp, Zea mays
  source 1..36: mol_type = other DNA
tcgctgcagccgctgctctgacaaagacaaaacagg

SEQ ID NO: 204 - DNA, 36 bp, Zea mays
  source 1..36: mol_type = other DNA
tcgccggtgccgctggtccgacaaagacaaaacggg

SEQ ID NO: 205 - DNA, 36 bp, Glycine max
  source 1..36: mol_type = other DNA
tagcggtctccggttcgctggagatgacgaaacggg

SEQ ID NO: 206 - DNA, 36 bp, Glycine max
  source 1..36: mol_type = other DNA
ttgcggtttccggttcgctggagataacgaaccggg

SEQ ID NO: 207 - DNA, 36 bp, Glycine max
  source 1..36: mol_type = other DNA
cccgttgggtcatttgacacggagcggtatttacga

SEQ ID NO: 208 - DNA, 36 bp, Glycine max
  source 1..36: mol_type = other DNA
tcgtaaataccgctccgtgtcaaatgacccaacggg

SEQ ID NO: 209 - DNA, 36 bp, Glycine max
  source 1..36: mol_type = other DNA
ttgcggtttccggttcactcgagatgacgaaccggg

SEQ ID NO: 210 - DNA, 32 bp, Zea mays
  source 1..32: mol_type = other DNA
tttctctccacaacaccattctgttgtggagt

SEQ ID NO: 211 - DNA, 32 bp, Zea mays
  source 1..32: mol_type = other DNA
ttcctctccacaacaccattctgttgaggtgt

SEQ ID NO: 212 - DNA, 32 bp, Zea mays
  source 1..32: mol_type = other DNA
tttctctccactacaccattctgttgaggtgt

SEQ ID NO: 213 - DNA, 32 bp, Zea mays
  source 1..32: mol_type = other DNA
tttctctccactacaccattctgttgtggggt

SEQ ID NO: 214 - DNA, 32 bp, Zea mays
  source 1..32: mol_type = other DNA
tttctctccactacaccattctgttgtggcgt

SEQ ID NO: 215 - DNA, 32 bp, Zea mays
  source 1..32: mol_type = other DNA
ttcctctccactacaccattctgttgtggtgt

SEQ ID NO: 216 - DNA, 32 bp, Zea mays
  source 1..32: mol_type = other DNA
tttctctccacaacaccattatgttgtggagt

SEQ ID NO: 217 - DNA, 32 bp, Zea mays
  source 1..32: mol_type = other DNA
tttctctccacaacaccattttgttgaggtgt

SEQ ID NO: 218 - DNA, 32 bp, Zea mays
  source 1..32: mol_type = other DNA
tttctctccacaacaccattttgttgtggagt

SEQ ID NO: 219 - DNA, 32 bp, Petunia hybrida
  source 1..32: mol_type = other DNA
tttctctccacaacaccattctgttgtggtgt

SEQ ID NO: 220 - DNA, 281 bp, Solanum lycopersicum
  source 1..281: mol_type = other DNA
ttaaacagcctgcacactttatattccccaggctatggagcccttgaggcagatccatataaacctaatttgtaaacatctctatcgtgaaaagcattattcacatccatcttagccaaaggccaatttcttgaggctacttaactgacaacagtctcgccacagacaatcttggccaccagagaaaatgtctcattatagtccaattcttcttgttgattgtacccattagccaccaaccagcctcaaatctgtccacatcaccattggtcttattattt

SEQ ID NO: 221 - DNA, 436 bp, Oryza sativa
  source 1..436: mol_type = other DNA
ttcggagtgtcagaacttagacgcgcgcttatcctcttgcgttttttgaccgtagaaaaactttgacgcgtgtgctcatgaaaattgatacaaatggtctgccgttgtacacgtcgactcagctgaaatttgataaacacgtaagaattaaattactagtaaaaaattgccacgtagctttcagctggtgcataagatggtccgcgcggcggatccaccttccgggcaaggtcaggcggccgccgcctggcttcaccgttcctgtcacctctatgatcaatagctatcgacatccataaaaattaatcgatcattcaaaaataatactccctcctgttttttatatgacactggttagtttaaacattaactagtcagcgtcctacaaattaaaaaatagaggtagcattagtcctctgagcttgagtgtgatacc

SEQ ID NO: 222 - DNA, 448 bp, Oryza sativa
  source 1..448: mol_type = other DNA
gtaagtactaattcatttatttctaccctcaaatattataaaagaaatacataaacctttgattttattcccccattctgattcagcctttcaaactgggccttatggcctctctatagcctactccaaaatcactatctgtcgcaggcgtacgttttggctttgcgttggcagtttggcacggctggtcggctggttgacccaacagcacatccacgggacacccagtgatggcgtccgggcttcgccatatacacggacgagacgctgccgccggtcgccgttgccgctgcgcctctctgagcttctgctgctgctgctgttcccactccgacagcgaggtctcaccgcctcaccgcccggcaacacacagcaacaacaacagcgcatagcgtcctctctatcttaaaataaaatactgtgacacatctgacgtcgttgacttttt

SEQ ID NO: 223 - DNA, 480 bp, Oryza sativa
  source 1..480: mol_type = other DNA
agcgctgctgccgtgccgagatgtgaacggaatcgcgatacggtgcaagcaagcgagtgcccccggtcgtgctcggctcgtacgcgcggacacgcgcggcgcggccggcctcgggttggacgagcgatgggtgcagcagatgttgtcacgctacaccgctggatggatggacccagggggtagctgtgacgggagcaacgaataaggcgtgatgaaccgtagccgcgcaagcaattgcacaccggggttgttccattccatctcaacgtacttcaattttccccggattttctgcgacgtcgttcggttggtttggagcagcgccaccgctagctatacgcgccgggggccggccggacgtccggtgtgagtctttaccttacaccagtacaccactcagaggagaaaaaaaagtaattattactgtttatttatttattacctttatttatttctgaaatttgtgaggtgggtgacttt

SEQ ID NO: 224 - DNA, 504 bp, Oryza sativa
  source 1..504: mol_type = other DNA
agttacaaacgactgcaatacactagaacatactctttttgaatgatctatgatcgtatgcctctagttgtacatgagttgtacaactgagtcatatgtacatgagttaggaacagacgtggcttcgtggcccagctcgaagaggcccgttggtgaaatggcctcttccatgatcttcacaaaatttcggcctttcagtcgtcagccgaagccagcaaggccgcaaagcctgttccgcgaaaaccgcagataattcgggcccagcctgttgaaagcgctccacggtccgtcggtcccggttggaggcctggaagtgggttactgggcttgtgatgaggcctggaagtgctccaactgggctttctgggcttggcgctcagtatagaggccgtggcccacagagagacgaggccaccactactattttgattttccagtggttttagtactttcagcaaattactgttcttttcatctaaacaaaaagtaaactatacgtgtttt

SEQ ID NO: 225 - DNA, 434 bp, Oryza sativa
  source 1..434: mol_type = other DNA
acaaaaagaaggagctttattgctcaaattactcccgttggccaggggcacgtagctggtgaagcgtcgcgcacgtacgcgatgcacccggcgacgagaggccgagacgtggacgcagaaagcggaggggggtcaaagaaacaaaaacggtgggtttgcagcagcaggtgggaggagcggaaaggcggaaagccgaggattaggcgacagcgggggccccgcggctcagagtgctaacaaagcttgcccccgggcgacacgggcccccgagcgcgagagggaggcaggggcaggcaggcgacgcgtcctttaatcgaaagcaaccaacacaaggcaacagggggaagcagcgcaagcaacagcgataacaaacgccatttcctcctctactctcatcacatttctcgggaaactattctaatcccgtaagaaaa

SEQ ID NO: 226 - DNA, 349 bp, Oryza sativa
  source 1..349: mol_type = other DNA
agaacttagacagttttatcaatatagagggtggagattgctaatatcgcggtttagagttgtcccttaaactcataaagagtagggatatcaagtggactttgtgcatagaatcgaccaaaagacaaaattcaaagtttgggccgaacgagagattagttgcaagggacggattggtcggcccaacgcgaagagagaggatcggggcctcgggggcgcggcggaattcccgactctccggctccgcctacgcacgccctcccgtctgtccgcccgctccaccgtctcctccgctcgtcgcctcgtcggcgcgcgttgcgagtcgcggtggtgccgtacggctgtcccc

SEQ ID NO: 227 - DNA, 500 bp, Oryza sativa
  source 1..500: mol_type = other DNA
tactaagaaaacttaaatttcatgaaaagaaacggttggtcctttttcttggatctgaattttgacagacattcagctctgaataaatcaaacagttttgctgttgcatcctggagctaagctagaatatcagacagtcataactcataatctgcttaatgggccgtgatccgatacatgtggatgggctggtactgaggcccatataaacagggctggcaattaatatcgcattaggcccagttaaacgcttgggcaactgggcatggctgctttgtgtgtaggccgtcagcaacaaacggcagccataatgttggctcgatttgagattggcacatggtttcagaattcagacatatggagtgtcaggactcaggagtgacctgtctgatgatcattcttcttctttcttctcttcaattctcttcacaagattttttaggttgacttttgtgctctagaaaataaatatactagtacataaattcatagagaagtac

SEQ ID NO: 228 - DNA, 380 bp, Oryza sativa
  source 1..380: mol_type = other DNA
tcctacaactccatatatatggttcgatcggtcgatcgtctgaactttttgtatgtagttgactcggtgtggatatattgatttggattggtcctgatttgtgtggatctccaatacttcaccaattaataaacttataataataaatactaccgcgtccaaaaggattttgtagtaattgtcctacggcaagcatgcatgcaaagaggctcaatcgatgtggacacggccgggccctgttcccctggacacaaggcatttctctatcgcctcactgcacactttactattcggatcacgcagcagctagccatggcgtactccctccgtattcgtaaataaagtcgttagttttggacagcgacagtgtctccaaaaca

SEQ ID NO: 229 - DNA, 711 bp, Oryza sativa
  source 1..711: mol_type = other DNA
acgtacgcgcaccaggttgtccggttactgcactttgttcatgtccgttgctaagaatgtgcaatcttcagaaatagcaccaaacgcgctcagtttgaacgcatatcttggtagatatacatgcatacagctagcacacgaatggcctaagttcgtacacgacgcaccgtgccgctcgtgtggagacggcgccgcgaccaaatccccatccacccatcgaatccacgtacgacttccattcgcatcgcccgtcaagaaaggaggatgcgtgtatctcccgcttccacagtgaacacacgaccgaaagccgtgcatatccatctcgatcgatctccctttcaccgcggcgcggccggccggcgcggtagctagccgccgaatcaagaggagcccgttcgtcgcgtccggcgagctaagcacgccatcgcagtgccgccacgtacgcgctcacggagagagaaaaaaaacggctgcaatgccgatggcaacgctgatatttccgctctcgattcggtcaagccaaattgccaaatacagacatggccaacctccccacaactctaaaaacatcaccgtaaaaggaggagcatagacaccggcccgatggataggcctgcccctaagtgacagggaataaactaaaaatccagagacttttcgacagcttcgtgacttgtctgtgtggtctagctgagctgggagatgtgatct

SEQ ID NO: 230 - DNA, 291 bp, Oryza sativa
  source 1..291: mol_type = other DNA
ctgtcgtccactccagattcactttcggaatggtgagtggtgtgtcgtcgtcgtcgtcgtcgtcgcgcaacttcaattcttggaatgtgaaatcatgctttaggttaattaggagcgttcacgtccatgtccatcaatccctctcaattcgaccgctaccttgctagctcgtcgggtttccgcgtctctgtcgtcgtcgcctcttccggccacccaaggatcgccgtcgccgccgtcgccatcccctgatccctggctcctccattgctgtacagcatattgcaacgatct

SEQ ID NO: 231 - DNA, 532 bp, Oryza sativa
  source 1..532: mol_type = other DNA
tgcttctctacacctgcacccaccacatcacctcattgcgagccagcaacaaaatcatcagaatggctcgcaacaaaatcatcagaaaaaaaagaggaaacaaacagagagcgaaaatcacaacaacaacaatgaactgtacccaaaacgaatagcaaaacagggcacaacgaggaggaagaaaaagagagatgcgtgtgtaggcggcggggaggggagggctgtgaaatcctagggttgggcgaagaggcatatttatagcggattcatgggctgaatttatgtgcttcgggcccagtaagattgtgcactaattcagcccacgttaaatggcccaactgaacagaagcccgttcaattaagcttggccacacatcctggcccaacgacaggcccactgaaattaagcctggaacaatatttggcccacgtactggctagtagaaattggccagaacgaacttctcatgggccataagtagatctttgtggatttttgtagtatatataaatttttaaagtaaatatattt

SEQ ID NO: 232 - DNA, 351 bp, Oryza sativa
  source 1..351: mol_type = other DNA
tatctggttttgcggtttagggttatgaattagattcgggtcacatttaagagagtcaaagtgaacttattccttaatgtagtagtagcatccaacaccaaaaatgggctgaatgcctgaacccaccaaccgaggcaaaacatctcatgggccaaaacctgacatggaggcccaatctccgaatcaggcgaagcagttcggtggacggtggacctaaccacggaccacccaacctccaaccggggccaagctgcaagctcactgccatgttccaatctcactttttccattctctttttctgcacagatcattgtgaaagtctataagtcagttactcctactccctccga

SEQ ID NO: 233 - DNA, 31 bp, Oryza sativa
  source 1..31: mol_type = other DNA
agggcccacgtgtccccattcccactcctgt

SEQ ID NO: 234 - DNA, 31 bp, Oryza sativa
  source 1..31: mol_type = other DNA
gtcggccgagcggcgggatcggtggggacac

SEQ ID NO: 235 - DNA, 262 bp, Brachypodium distachyon
  source 1..262: mol_type = other DNA
atttctttatgagggaaagaggctcatagccctctcgtctaaggtctaaaacttaggaagaaaagccgaacatgatccaaggagttctaacagggaaagcctttgagccagctcaacatcttattatgtgattttcgtatctttcagtcgagctcttgcatatctcttgtttcagccgatttcttctactttagtgatctaaggtccataagcagtcttggttgtagctgcttccgaagaaaggacctaaacgcccaagagg

SEQ ID NO: 236 - DNA, 404 bp, Brachypodium distachyon
  source 1..404: mol_type = other DNA
aagactgtccagtttaccagctcaggtaattaggatgggagacggagtttttttttttttaggggagaatgggagacggagctggatgacgcttcatgaccgtggaagatgggttgaaatgttgaatggatggcgagctgtagagtccatgtaggtatttcacgatgcgtgtaacggggaaggggagaacgaaagaagcccagcaagctcttgctaacttgggccgcgcatgaggattgtacgctcgggaccgttggatgggcatggcccatggctccgcgggaagcaaccaggcaacagattgggtgtttagtaccacctcgcccagcgaggaacaatccgtgttgtttataaactaacgctccgaactagtgttgtcccttcggggacatccgataaaattg

SEQ ID NO: 237 - DNA, 320 bp, Brachypodium distachyon
  source 1..320: mol_type = other DNA
tctggtcagcacttcttgtagcctttaggaactggggagtgaaaaagaaaggcttgggaattataattcaaattagtatgttaaaaggcttcgtttctctatagcccatttaaggcccagtacaaattatcgggtgttcccgaagggacagggcccaaaacaaatgaaagattgattttagagagaaacaacaactcactgggcctaactactctatcggtgattcggtccgagtcacccaacttcgctggacttccaaaaaatagcaggcccgcaacaccgtacccttggaacttggagtgccgttgtcactgcgactt

SEQ ID NO: 238 - DNA, 182 bp, Brachypodium distachyon
  source 1..182: mol_type = other DNA
cggagccgagcccacaaaaacggctcgttaaatcttcgggccgagctgcggcccaactagcaatctggcccagttgggcgattaagtggctggcccagtagggttccccgatccaaatcgacctcacctcgatacctttccttccatcccgagccgcctcctactctgcctcacccctagcc

SEQ ID NO: 239 - DNA, 640 bp, Brachypodium distachyon
  source 1..640: mol_type = other DNA
gcgaggaggttccaaacgggcgaggccgcacttgccggccagggagccacgaagaagccgtgcctggtcagccgacctcctcctccggatgactctcgtcgcttcttcgtatcgcccggcacgttctagacgcccccgaggagtaaaatatgtcacgtgcggttaatctgatcgcgaggcggagccggccgccgggtcaaaaaatccggatcccgtccacatcgcacgctccgccgctccgccccgtgaaaaggctgtggcggaccctggttaatcgatggcaggtggggctatgtctccgtggggccgatatggctgtggctggcagcgtgctccgcggtacgtgagaattaaagcgggggcggtgtttctctggccacttgcgcttgtggggaaagcggtggcccgggggtgagctggatccagctgcgacgacgacgactttttcttgagtgtcacgctgaatgagagatcagatccgtcgtatccgagcgtggtggggcccgcctacgtttcggggccatcctccccgaaaacggccccgtatggactgatctcctccctacgccttgcccttgcggccgtatacaagcgggttagcgggacagtgtgcaaaccacctacgcgggttgtcagatcc

SEQ ID NO: 240 - DNA, 568 bp, Brachypodium distachyon
  source 1..568: mol_type = other DNA
tcaattcaattcggatccaaaccgattcgttcctccaaatccctactcagttctccctaattcgcttttcgctttgcttctctgttctacttggcgcagctctgctgtgtacactggtcttcttctggaggtgggagaagggggcagagagggcggtatttgtacccgaagccaggggcagtttcgggaaattgcgtttcatggtttcgcagccagtggttttggtataatcgcggcgtgacgcgagattatcgcgagtcgcgacgagaaattacgggcggcatgggcgtgtgatgatatggccatgggatggctgcaggtgtccaggcttatcctcaggggccagtggtgagtcatcgttttcacgtaccacgcctgtgggtggcaggcagtgggcacctcctgtcctgctgcttgttttgtcgcctttggattccgttgcatccactcttgtccacttctccgtctctttgtttacagtcttccaggagacaatcattgcttcgtggtgatcctacacgctgttgacatgggtaatttgcccggttttaccggaggacacaaataa

SEQ ID NO: 241 - DNA, 2820 bp, Brachypodium distachyon
  source 1..2820: mol_type = other DNA
aatcaattagtagtagtatccctagagtccactcctcccccacaccactagtgaaagagaaaatgtaaagactaccattaaagcagcccaagcaagacttactatatccatctaaattacgtctcctatttctatgaaggaatttttctactattgatcaataatcatagcggaatcaagggtacagagtcaaaaagggattctgccctaagactatggatcaatcagttccaagaatttactcctaacaaattattataggaattctggtagaattagagaacattaaatataaatacgatacatagccctttcttttccgtaaaaaagaatacgggaatgatgtcctgaatataagaagcgggaataggaagattttttattccttttgttactccttttttataagtaaaggacgcccgaatataccataaaattatggataggatagataaatatttattggatacctaccttacctatgtttagttttgacttaatcctacaacctcgctttctatcattctatgaaaaaatgaagagactttatccacaactcctaaatttatttaggatcggcctatttaatctgattttcgctagaataagtagcccttactttagtgtatgtaggtaacataagatgtacgataaaaaaatgtatgataattaggaagtcttgatattctttcgtggagtcccttcttcaatcttagattgaaaaaagcggaatgccctttagggacctttcctttctttggataccaagatttctgaaatcttagcttcgtagtttttaattctaaaataggatcaattaagaactaattcaaattcatataataaaagaataagaaaacgctaccttatccctagtggtaatggtttgggccagtaccgccaaaacaaaccctagtttgaggatagaactatggattctcaaaatccagtatcgccaagcctagttactctcttgcccgaacttatgcgaagtatgaatttctcgagttcgatcagtactataagcctaagtatttatcgatcaggcggcacccagatttgaactggggataaaggatttgcagtcccctgccttaccacttggccatgccgccaaaaaatccgatcgaaaattgagaaaagagcaagtattcacccacgttttcttacgaaaatcccctttcttttattttgaatctaattctacttacttttttccaatctttttcaaaaaatctatttctgcttctttttgatcctgtttcgattattctcctcgatggattctatgttaaaacatacattgctaacactagaaaactttctgcttctttctattgagatgaaaaaggagaaaaagtagatttctagggctgcaaaattcataaaaaatgggaaccattaactagaattctcttttttttatttgcagtagtaaacgactctaaatgtgtattttcccccctcttccttttaaaggcataataaaggatttttttatacctaatccgtgtataggtaaactccaggtccgaacagcattattatccaaagatcccccttatgtatatctctatggggaatcgtgctttaatttttcaaagcattaaatatcttgaataaaaaaaggaaatttgctctgatataatttgctctgatatagagtataagctgactatcttgacccacccaagtgaaattacgaaaaaagaaaagcagggatatgtggagaggcggataactagattggcatgtacttaaaagggcacttactttattttaggattctacaatgaaatcctaaatttgctagcaattctactagaccgaaacaaaagcggaaccctcaaattcttttttgaaattaaactaagcgcgctattctaaatcgaagtaaagtcaacaaactctctagtgtattatattacggctttatcgcattcatagaaaggagataaaatgagaaatctttgccattcaatctgactagaatatcatcattcaatctgactagaatatcataaagtataagttataagtggcataatttttttataagaatgttttatcaattcattttcattccatttgtaccctggcaaattagaactttcgtcgaaattgtctctattcatatgtatgaaatacatatatgaaatacgtatgtggagttccctagaatttcatgtgattcagtaaacagaatatagattccatgattgctagatcgatccgtagggttgatgaagagtgagctgataatggaatttttcttcgataaacaggaaacttaagattaagatgctccggaatgggaatgagggaatgtccacaatacccggatttagtcagatccaatttgagggattttgtaggttcattaatcaaggcttggcagaagagcttgagaagtttctaacaattaaagatccagatcacgaaattgcatttcaattattgcgaaaggatatcaattgctagaaccctcgataaagaaagggatgctgtgtatgaatcactcacctattcttccgaattatatgtatctgcgagattaatttttggtttcgatgtgcaaaagcaaaccatttctattggaaacattcctataagtaattccttaggaacctttataataaatggaatataccgaattgtgatcaatcaaatattgctaagtcctggtatttactaccgctcggaattagaccataagggaatttctatctacaccgggactataatatcagattggggagggagatcggaattagcaattgataaaaaagaaaggatatgggctcgcgtgagtagaaaaca

SEQ ID NO: 242 - DNA, 548 bp, Brachypodium distachyon
  source 1..548: mol_type = other DNA
gcactgctgacacaagtctctcgtgactgtataccacgagacagtcgttcaactcattagtcaattcagcgtgactcgtgctgtatcttatctgcgacagccgaggacggtctggttatcatgtaaagcctgcacggtcgtgtacgagttttttttttttacagaggcaatcgtacgagtagtgttttctgggctagagcctagagatggagtacaaactagctgggcctgctatggcatggccgcatgggtcactgattccctcgtgttctctcgggtcggataacaaacaatttaaagggagggactgactgacgtggctgcattaccttcccaaggcaacaaaggccccaagtgtccattgggcttcgcttaaacggagggactggctgactgacagttcgcggtgccagtccaatgggccgcgcggtttgtggcacccggccggcctgctggttacctgggcctcactttcagtgaaaccgaacaactcgttcgctcttgtctcaccgccgcgggacgtgttttttgagcctgcgcaggaaatc

SEQ ID NO: 243 - DNA, 937 bp, Setaria italica
  source 1..937: mol_type = other DNA
gggctgccgattaggatgtgaacttttgatgtggagtggagatgcttgctcctcaaagataggccttcccggtgacttgggctccggtccgggcccaaagcgagtgttacaggctgtttcttctttttctgggttattcatgggcctttttttgaaagcggttattcatgggctttgggcgaagataggtataggtggctctagagaataggtagagacgttttcgttacttgtagtatttgagcccagatagggcaggcaggacattctgctccttttcagcccacgaagagcgggggatcgaccgacgagagcgaagcaaacaaggaggacggtgatggtttgtgttggcttgttggcatcagtggaatggaatggccgtcgtctgtcttttgtgtcagcgtccaacgagcaaccaccaaccgcctcaattgacctggccaggcctcctacccgtggatcacgcgttgaacataaatgcagtccacggctgccctacacggcggcgcgcgccataatcatgccccccgttgatcatcgtctcttgtcgtgtcgtcactgctaggagtgcactgctcatgcaataattcaaagagatgagactgcatttacgcggtcaaattggtgattgatgtatactactatactgtatctgcattactgcacagctgcctgtagactcagattgaagcagtagaagaagaagatcacgaagggcaagggtggaagaagagaacactcatcagtgtcgtttcggtgccgcggagtacctaccagctcaacctcgtacagttacgcgtatccctcgccgcactaccccggtccaggtcgtgtggtacgtatgtgtcggcagcagctagccgccgcgcgggccatccatcacatgtgtcgcgcgtggcaccgcggcgagctacacctgctgcaaggcgaggcgatg

SEQ ID NO: 244 - DNA, 974 bp, Zea mays
  source 1..974: mol_type = other DNA
atatttttactttacacaattctaaaaatattaaacaatgcgtaatattgctcaaacctaaaaaatagattgaaccctgcgtctcaatcaattttgttttgaggacgtatctggtgcacctagaagactggtgcacatggtgcacatattaaatcattaacactcattttagatctaacgtctctagttgattattcaatttacaaataacaccttccaccactatacaacaccacgttggagggtgtccttaataaaatgtaccaaacaactagagacattagatttaaaatgagtggtgatgatttaatatgtgcaccatgtgcaccaatgttctatgtgcaccagatatgttgtcttttgtttttgccagtcatgtgacccttcacacaggtaagtgcttaaactaacaggaaaatcaaatcgtatagctacctggatttaatatttgggactcaggagaaaaggggccctaacataactgggccgttcagcagcagatagatgtcgccgtaaattcggcctatgaaactcgtccatgcggccgtataaagacgacttgtcgttgggcccgagttaactagttataggcccacacgcgttgcacgcgactggcgagagagaagaagactggctagctgtcagtatggggtaacaagcacagcagcagcagcaggcggccgcaccgcacgcggtctggccgccgtccgcgcagcgtgaaagaaagaattggatgctgctgcttagcagcgaaggaagcgggcaggaaggccgtgtggggtccacacctccccggacacccgcgcagccgccgcccacgcttggtccgtcagccgccggccgatcgattgatggatgcatgcatccaccgtccacgtacgcggcgacgagacgtgttgcgtttgcgtgccaccggactagctagtagatcgctcgactggtatgtagctgtcgccatcccatcgccctccctc

SEQ ID NO: 245 - DNA, 963 bp, Brachypodium distachyon
  source 1..963: mol_type = other DNA
ttcagggaaagcttcagtcactcttgagtctcgagcacaccactccctcttggcctcttctatagtgtgccgaagaaaaaaactggctcgccaaaagcactaggcacgatgttggccgctatcgccaccacatgcgcaccgcctgctgccgcctccaacacatggccgtgccgtcgccgccgcagccactgggtcagcgcgatggataggagagagagagagagagagcatcacgatggagaggagagagaggcgtgaaaacatggagcggcaatgcagcacgatggagaggagagagagacgcctaacatggagcagcacgatgggggggagagagagagaggggcagagagagagagaggcgcttgaggttggggaagaaggaaaatgaggagtgggactcagcagcagtcagaaggcagttttcactatgtggtgtcgggcacgaatctcgaggcacagcggacggatgggataagaggagcagtatgatccagtgtaaaaaatcttttttttttcatcatcctttgcaaattttaaagcacaaatcatatccaacggccgaaaaatcaacttatctctaactaaaaatctgacaacctagaactaacaaaaccgtaatatctttatccagcggagcaaggtaagaacatctgcgagaggttcaatcacctcgcatcaccaggtcgatcagtgagatgaaaactggtgggtggtgtcgtttgattttgtcacggtttcaccggatctaggcaagtattgtaccgtgataaaatgaaacagagcacatatgtgcatatatggtcgggatagtgtaggatgtgggcgatgcgatcttgggctccaggtggcggccgacgagtggtcgcgtggagggggatggataccgcgccatatccagaggcgaagcagcagccaattgggtcgcggggacgtgtctcgccgcgcgtccaccagcttcgc

SEQ ID NO: 246 - DNA, 957 bp, Zea mays
  source 1..957: mol_type = other DNA
tatttgaatttatttttatattaagcttatttgaagatacaaatattactagtgttttctgtaaatttggttaatattaaaaagattggccgatataagtacataacaaaataagtatttattttgtggcgaagggagtatcttcgttgcacacgtgcgatgaccaggtggtgatggggtggaccgctgactcgtggacttgtcttggagccacatgtatatgcactgatttaataactaatttgttgcaccatgacacaatttagagggttttgaggatggctctagattccagctccaatggtgtagtttataatattaatttacataatttttaaattattttttaatctaaataataaataaaatgactcatataaatgtcttgtaaaggcttacatgagctttatcagcacgattttctggagcacttaataacatactacatcaacttcaccaatttttgtggagctggagctgtagctattccgaacagggtcttaataatcagtgtacttcttatgtccatatgatttagtcgttttgagtttgttcaaaattaaactatttaaactttgaccaataatatatataatattaaattattttaaactaaaaggattatccatctttaacaaatttcccgagaaaataaattatccatccttaatttcctgtgttttttggtcatatatgcatcatggtagtattagtacgtacacaagttttcaggcaagctaggcctcatcgaacaagcaagcaatgtcttgcattactaatgtgtgttgccttcgtcgtcaaagaggatggatttttctgcacatctagatgcttgagcagatttctgcgccatatatgcaaggtcttccactgttagctcctcaacccagtcaaagaaaataggctttaccacacaattaactgatggcatgcatggcaaccttatcctgctagacg

SEQ ID NO: 247 - DNA, 953 bp, Brachypodium distachyon
  source 1..953: mol_type = other DNA
tatcacaagttcataatacttttctgcagatttatcacgagatcaagagaagattgcaattaattcatctttcttgttattcctcgaaattggttttagattaatcctcgtaactttctgtcagctgttactattttgatcatatcttttgattggtaagtccgattgagctgattcttgttgcgttggttagataattttaatacctttcttttccatactcatacgtattttttggttcatccaatcaaaagttacggctgttttactatcacggacagaaaggtgatttagggtttgaactttcgggaaaagttttaatttgcttccgcgcaatcattcaccccccctctgattgcctatctcgatctcacaccttctcttacacattcgcattcactgatattcaccagatgttttctgttcccctggctttgcaaagtaaccaaagtggctcaaccttttgctgtgctttaaccaatatgactaattaaccctggtttgataaggaactcaaagcagtgggcacgagcccagcttaacaaaccttatcaccgtcttcatgggcatggtcattgggcagtccacccaacctgctttctgctcgggtatgagacgagtgacacttgcagttgcagcgttgcagagcttagtgcttgcagctctgttatgcttgctagttgagtcgccttcagctctccatttagcactagtgcgtggaccattttttgctctccatcatcatcatcatcatcctgtcttcttcttcttctttcttccctagctagtagcgcacacacacatacacgcagtatgctgctgacaagtaatttaaccacaatactgaattaatccaagcaatctgcgttgcacacttgtactgcactagcaatggccatgtggccatgcctgcacttgcactcactagtcaccaccattgatgcaatctagca

SEQ ID NO: 248 - DNA, 950 bp, Brachypodium distachyon
  source 1..950: mol_type = other DNA
gggttgggtcggcagcatctttgtcttgcgtttgtcctccctttgctctattttcctcccctagcccgcatgcctatgactaataaaccgggaccaaatgggtggctgcgttggggggcactggcagatccaaacggacgggtgccacacaattggtacagatctgtccggtcacggacgggtgccgaacaactgcacagatctgttcggtccgcgacccaaacagactgaatttgggtcgccctgctagagttgcccttaagacacatagaaagacaccggctcaatatatgtaaagtagctaatataatgagaaatctaatattcccttcgatccaaataacttgtctagatacgtatgtatgtatctacacaacaaaacgcgtccgagacaacatgagtccgagaattctacgccaccaggtatactagattttacaataacttattttggctaaactccacttttcattttagatctaatacgctcaaattcaattgattgaaatttagttaaacggttttgctatatctaagttgcctgatttttaattaaagataagttaatttttagccattagatatggtttgtgctttaagattcgtaagaacgaaaaaaaagatagtaggatgaagttcaaataataatccaaccgttcagatgagatttagtcattttactttaaaaatcaagtaaaaccctttgcctgtaacaccgacaaggcaaagtcttttttttttccttcctttcctttttgagcctcaaaagtgtattcagatcaaagggaaaggctgaattctcagatccggatgtaagcaaaacacttacctcacgggtgacgccacgcatacgacacgcactcaatgacagcacaacctcgccccatacgggtccatcttggttgttccagagaccaccacacgtcagtcgtcacgtccacacctccccg

SEQ ID NO: 249 - DNA, 897 bp, Zea mays
  source 1..897: mol_type = other DNA
ccctagctccctgcggctgttacgcggtcccccatcaatcttctgttcttgcggttgtagcctgtgtaacagtgctagagtatgtatgataaataggttttaagtctgcttacatgacattttttattgtggaagagacatataaaaattagagagagtggttctcatgcaacggcggacggcccggtgctaaaagagcttcaagacaaaataatgaaacaggaagagagtagatttatctaagagccaactttattatatgaatgtgtttattgttggctttagatgatatggtaaggagttagagctaataatagataggctctattattattattattaattaaactcgctctaaggaggaaagtgggaggaagggacgaggacgaagactactggaagcatcgtgcatggatgatggatgtggtgtctcttaatgtaggtggccggaggatgtacgtgttaattgcgcgataagcactcagatccaaccgcaaactacctccacactgacacactgatagagagaaagagagacctccgacgactgccgccgcagatgagccacgtacgtatacgacgtctgccggccggctcaggctgccgccatcaccctgctcgaaagtcgcgttaggcggcgcacgctacataggagtatctagtctagccagttagtatactactactgcgctgatgatgaattaactctgcatagatactgtacttgcctccctccaacacccaaccacctcctgctcggctcttaataacttggacacggatcgatgccatccaaggaagaacacgacgacgacgacggaacatccaccatgcaagcttgcatccatacgccgatacgcgtgcatccatccatccaccattatttccattttccac

SEQ ID NO: 250 - DNA, 1065 bp, Sorghum bicolor
  source 1..1065: mol_type = other DNA
ctgatggctcgtgatactgctcagtattgggtccgattcctttcccatcattacacagatcacttgagctttctttattagtgatctcttatttgcagccttgtcacagtaacatgcatatcgtcttcatccattctctttttggcatcaacagatccctttctttgttcagaagctggacatggttctatatgttctgccggttccgttccctgcatgccaattgttgcataataacctcattataagttacttctgtacaggtggaaagcattttccgtgtccttgattcccgaacttccaagattgtctgctgcaagtgtcctctccatcaatatgtacctgcgagatactattgtgccaagcttcatgtatactttgatatcttgatggttatcgattgtgaatcgtgcattgtaagtatccaagttgatggtttactttggtagtatagttcttgaggtacgctgcacatctggatattatacagctggtacaatttgaaagcaaagtacgaagtcctggctcttccttcgaaatggaagtttggaacttccagaaatatcggtaacataaaatccatgctatcttttgtgcctttcaaaatttggatcattggtcccaacgttatttaggagatcgtctcgagttatattggcaccagaaatcgtatttcctgagtggagctataaatttggtattatcatttattgtgtcatattgcagtacagcaattaaaaatagttcaaatttgctgcagatggcataaattcgtgcagaatccaagaagcaaattgtactgcttatctatagtgttagcttgctccctttccatcctaaaaaaagtgttggatcacgatctacacaaaccaatggcctgaacacatattatttcatctagaagctacctagccttttctgctaaggcgcatcttcgtcaacgccaaagaaaaattaggagaaaactggatcagagtcggaatgtttatggaaacccgtccgggatgagagaacagtaaaacaacaaggccaaggtagggataaaatcaaatcggatacggacat

SEQ ID NO: 251 - DNA, 3135 bp, Arabidopsis thaliana
  source 1..3135: mol_type = other DNA
atggagcgtgcaaggagacttgcttacagagggatcgtgaaacgtctcgtcaacgagacaaaacgccaccgtaacggcgaatcctctcttcttccgacgacgactgttactccctcaaggtatgtctcctccgtctcctcctttctccatcgccgtcgtgatgtctctggatcggcttttaccacctccggtagaaatcaacaccagacacgatcgatctccgtcgatgcgttgaagccaagcgacactttcccgcgccggcacaactcagcaacaccggatgaacaagctcagatggcgaattactgcggattcgataatctcaacacgttgattgattcgactgttccgaaatcgattcggttagattcgatgaagttttccgggatatttgatgaaggattaacggagagtcaaatgattgagcatatgagtgatttagcttcgaagaacaaagttttcaaatcgttcattggtatgggatactataacactcatgttcctcctgtgattttgcgtaatataatggagaatcctgcttggtatactcaatatactccttatcaagctgagatttctcaaggaagactcgaatctctgctcaattaccagacggttattactgatctcaccggtctaccgatgtcgaacgcttcgttgctcgatgaaggtacggcggcggcggaagcaatggcgatgtgtaataatattctaaaggggaagaagaagacgtttgttattgctagtaattgtcatcctcagactattgatgtttgcaagacgagagcggatggtttcgatttgaaagttgtgacggttgatattaaggatgtggattatagctctggtgatgtgtgtggagtgttggttcagtatccggggactgaaggggaggtgttggattatggtgagtttgttaagaatgctcatgctaatggtgttaaggttgttatggctacggatttgttggctttgacgatgttgaaaccgccgggtgagtttggggcggatattgttgttgggtcgggtcagaggtttggtgttccgatgggttatggtggtcctcatgctgctttcttggctacttcacaagagtataagagaatgatgcctgggaggattattggtgttagtgttgattcttccgggaagcaagctttgcgtatggctatgcagactagggaacagcatatccgcagggataaagctaccagcaacatctgtaccgctcaggccttgcttgcaaatatgactgctatgtatgctgtttaccatggaccagaaggcttaaaatctattgcacaacgggttcatggtctcgctggtgtatttgccttaggattgaagaaactgggaactgcacaagtccaagatcttcccttctttgacactgtcaaagttacatgttcagatgcaactgcaatttttgatgtggcagccaagaaggagatcaatttgcgtcttgtggactccaacactattactgttgctttcgatgaaacaaccaccttggatgatgtcgataaactttttgaagtttttgcttcgggcaagcccgttcaattcacggctgagtctcttgcaccggagtttaacaatgctattccctctagcctaacaagagagagcccttatctgacccatccaatcttcaacatgtaccacacggagcatgagttgcttaggtacatccacaagttacaaaataaagatctatcattgtgccacagcatgattccacttggatcttgtacgatgaaattgaatgccaccactgaaatgatgccagtcacatggccaagtttcaccaacatgcacccttttgctcctgttgaacaagcccaaggttatcaggaaatgtttacgaatttgggtgagctcttatgtacgatcactggattcgactctttctcattgcaacctaatgccggtgctgctggcgagtacgccgggctcatggttatccgtgcatatcatatgtcaagaggcgatcatcacagaaatgtgtgcatcatacctgtttctgcacacgggacaaaccctgctagtgctgccatgtgcggaatgaaaattgttgccgttggaactgatgccaaaggaaacattaacatcgaagagttgaggaacgccgccgaagccaacaaggacaacttggctgctcttatggttacatacccttccacccatggagtctacgaagagggtatcgacgagatctgcaacataattcatgaaaatggaggccaagtttatatggatggtgctaatatgaatgcacaggtgggtttgacaagccctggttttattggagcggatgtttgccatctcaatctccacaagaccttctgtatccctcacggaggtggaggtcccggaatgggccctatcggtgtgaagcaacatttggctccattcctaccttctcacccagtgatacctaccggtggtatccctgaacccgagcagacatcaccgctgggaaccatttctgcagcaccatgggggtctgcgcttatcttgccaatctcgtatacttacattgccatgatgggatctggaggactcaccgatgcctcaaagattgcaattttgaacgctaactacatggcaaagcgtctggagagccactacccagttcttttccgtggtgtcaatggaacagtcgctcacgaattcatcattgacttgagaggattcaagaacactgctggaattgaaccagaggatgtggccaaacgattgatggattatggtttccatggaccgacaatgtcttggcctgtccctggaacgcttatgatcgagccaaccgaaagcgaaagcaaggctgagttagataggttctgtgatgctctcatctcgatcagggaagagatttcacagattgagaaaggaaacgcagatccaaacaacaacgttctgaagggtgctccacatcctccgtcattgctaatggcagatacatggaaaaagccgtattcacgggaatacgcagccttccccgctccatggctccgctcctccaagttctggcccactacagggcgagtggacaacgtgtatggagaccgtaatctggtgtgcactctccaaccggcgaacgaagaacaggctgcagctgcagtgtctgcttaa

SEQ ID NO: 252 - DNA, 1700 bp, Arabidopsis thaliana
  source 1..1700: mol_type = other DNA
atggagcgtgcaaggagacttgcttacagagggatcgtgaaacgtctcgtcaacgagacaaaacgccaccgtaacggcgaatcctctcttcttccgacgacgactgttactccctcaaggtatgtctcctccgtctcctcctttctccatcgccgtcgtgatgtctctggatcggcttttaccacctccggtagaaatcaacaccagacacgatcgatctccgtcgatgcgttgaagccaagcgacactttcccgcgccggcacaactcagcaacaccggatgaacaagctcagatggcgaattactgcggattcgataatctcaacacgttgattgattcgactgttccgaaatcgattcggttagattcgatgaagttttccgggatatttgatgaaggattaacggagagtcaaatgattgagcatatgagtgatttagcttcgaagaacaaagttttcaaatcgttcattggtatgggatactataacactcatgttcctcctgtgattttgcgtaatataatggagaatcctgcttggtatactcaatatactccttatcaagctgagatttctcaaggaagactcgaatctctgctcaattaccagacggttattactgatctcaccggtctaccgatgtcgaacgcttcgttgctcgatgaaggtacggcggcggcggaagcaatggcgatgtgtaataatattctaaaggggaagaagaagacgtttgttattgctagtaattgtcatcctcagactattgatgtttgcaagacgagagcggatggtttcgatttgaaagttgtgacggttgatattaaggatgtggattatagctctggtgatgtgtgtggagtgttggttcagtatccggggactgaaggggaggtgttggattatggtgagtttgttaagaatgctcatgctaatggtgttaaggttgttatggctacggatttgttggctttgacgatgttgaaaccgccgggtgagtttggggcggatattgttgttgggtcgggtcagaggtttggtgttccgatgggttatggtggtcctcatgctgctttcttggctacttcacaagagtataagagaatgatgcctgggaggattattggtgttagtgttgattcttccgggaagcaagctttgcgtatggctatgcagactagggaacagcatatccgcagggataaagctaccagcaacatctgtaccgctcaggccttgcttgcaaatatgactgctatgtatgctgtttaccatggaccagaaggcttaaaatctattgcacaacgggttcatggtctcgctggtgtatttgccttaggattgaagaaactgggaactgcacaagtccaagatcttcccttctttgacactgtcaaagttacatgttcagatgcaactgcaatttttgatgtggcagccaagaaggagatcaatttgcgtcttgtggactccaacactattactgttgctttcgatgaaacaaccaccttggatgatgtcgataaactttttgaagtttttgcttcgggcaagcccgttcaattcacggctgagtctcttgcaccggagtttaacaatgctattccctctagcctaacaagagagagcccttatctgacccatccaatcttcaacatgtaccacacggagcatgagttgcttaggtacatccacaagtt

SEQ ID NO: 253 - DNA, 1706 bp, Oryza sativa
  source 1..1706: mol_type = other DNA
ggtgacggcgacgcgatcgaacaggtggtgatcgatgctgcaacgtgtgtaaatatacagcgccggctgggtcaagagatggctcgggtgacgcgcgcgcggcgtgtcctggcgttggcgccggggcattctttagtttttcatcttttcatcatctcagatggtagatacaaaacagtgtatgtatgtagctctgtttctctctatagaaccccaacaaattttgttgttgatgttgtttatcttcatatgctttgatcttgaaatcgtctaccttactactgccgatcgttgctcaaaagtgtggaagtttgaagcatcttccacgggcgttgctctactcccatctcgtttcaccacgaaatccccttcgcatagaggcatctcagccgtacatctccaaacccacgttctggattcagcaaacggacggcatatgccagcggactgactaggatttgtggttcagaataaaaatatggtttgcagtgtcaattttccaggagagtgactatgtcatactaacttcatactccaataatgaagctaagctatctccatgtacatatcaaatacgaaatcatatccaagggaactaacacagtcacaaacaacaggtacacagacaattacagcacaagcgcaggagggaaataattttaactgaactaggaagaaaggaaacacaactcattttttattgatatatgttggatgaatccaataaaaccgatacaagtcacgaaaaatcagactagatgaatccttcgagatcacatgagcaaaagctttcgacgaaagctgtcctatagtcgtggaagcaataacacttgataaagataggaattcagacacgagaggttgcagactataagatgtcaaggcagcagcagtatccaactagtcatgtatccagcctaaattgaaaagtcagatcatgtgtaacatggccctcaatatttcgatgttgccttgtggaaaaaatagctggtattggtactgtgttttttactccttccagctaccgacgttcagtgttagtgcacaaaatgttcatccatggtagtttgtctacattgcagtcatgtaaagttaaacattcacgatttctgtacttttgcatgtgtaactaaatgaaatggtgtgttacattcattccttcaatcaaataatccatagaaacaaactggtttgtaactattgtaactagtcgctagtgtccatggtattttcgattgtggaacataattagtttaatctgcttcagtataacttaagccggctttatcctgtgtatgcatcagcttcgctccattgaacatccaaacatcagtataagcattttgtggcgactaatcatccggagatagggcaatgctttctaccaactgaagagtagagacgtgatgctgtgagatggaatgcaaatttcgcatattagtaagaagttggggaaggattcgaccactcactgagaagctagagcatcatggcacagtaattacaatgtaacgtagcatattcttgaacaagaacatctggtcaaataccaaccgggaaaaaatccacatcgataaagaggtgccgagtgcttacatcaacgtctttgccataatcagaacactactccgtacaagctaacacgagagcagagattacatttgcacggatgcaaaagtttccaagatagggaactggagtgaagc

SEQ ID NO: 254 - DNA, 1706 bp, Oryza sativa
  source 1..1706: mol_type = other DNA
ggtgacggcgacgcgatcgaacaggtggtgatcgatgctgcaacgtgtgtaaatatacagcgccggctgggtcaagagatggctcgggtgacgcgcgcgcggcgtgtcctggcgttggcgccggggcattctttagtttttcatcttttcatcatctcagatggtagatacaaaacagtgtatgtatgtagctctgtttctctctatagaaccccaacaaattttgttgttgatgttgtttatcttcatatgctttgatcttgaaatcgtctaccttactactgccgatcgttgctcaaaagtgtggaagtttgaagcatcttccacgggcgttgctctactcccatctcgtttcaccacgaaatccccttcgcatagaggcatctcagccgtacatctccaaacccacgttctgtgacatcttatagtctgcaacctctcgtgtctgaattcctatctttatcaagtgttattgcttccacgactataggacagctttcgtcgaaagcttttgctcatgtgatctcgaaggattcatctagtctgatttttcgtgacttgtatcggttttattggattcatccaacatatatcaataaaaaatgagttgtgtttcctttcttcctagttcagttaaaattatttccctcctgcgcttgtgctgtaattgtctgtgtacctgttgtttgtgactgtgttagttcccttggatatgatttcgtatttgatatgtacatggagatagcttagcttcattattggagtatgaagttagtatgacatagtcactctcctggaaaattgacactgcaaaccatatttttattctgaaccacaaatcctagtcagtccgctggcatatgccgtccgtttgctgaatcaggcagcagcagtatccaactagtcatgtatccagcctaaattgaaaagtcagatcatgtgtaacatggccctcaatatttcgatgttgccttgtggaaaaaatagctggtattggtactgtgttttttactccttccagctaccgacgttcagtgttagtgcacaaaatgttcatccatggtagtttgtctacattgcagtcatgtaaagttaaacattcacgatttctgtacttttgcatgtgtaactaaatgaaatggtgtgttacattcattccttcaatcaaataatccatagaaacaaactggtttgtaactattgtaactagtcgctagtgtccatggtattttcgattgtggaacataattagtttaatctgcttcagtataacttaagccggctttatcctgtgtatgcatcagcttcgctccattgaacatccaaacatcagtataagcattttgtggcgactaatcatccggcttcactccagttccctatcttggaaacttttgcatccgtgcaaatgtaatctctgctctcgtgttagcttgtacggagtagtgttctgattatggcaaagacgttgatgtaagcactcggcacctctttatcgatgtggattttttcccggttggtatttgaccagatgttcttgttcaagaatatgctacgttacattgtaattactgtgccatgatgctctagcttctcagtgagtggtcgaatccttccccaacttcttactaatatgcgaaatttgcattccatctcacagcatcacgtctctactcttcagttggtagaaagcattgccctatctc

SEQ ID NO: 255 - DNA, 1706 bp, Oryza sativa
  source 1..1706: mol_type = other DNA
gagatagggcaatgctttctaccaactgaagagtagagacgtgatgctgtgagatggaatgcaaatttcgcatattagtaagaagttggggaaggattcgaccactcactgagaagctagagcatcatggcacagtaattacaatgtaacgtagcatattcttgaacaagaacatctggtcaaataccaaccgggaaaaaatccacatcgataaagaggtgccgagtgcttacatcaacgtctttgccataatcagaacactactccgtacaagctaacacgagagcagagattacatttgcacggatgcaaaagtttccaagatagggaactggagtgaagccggatgattagtcgccacaaaatgcttatactgatgtttggatgttcaatggagcgaagctgatgcatacacaggataaagccggcttaagttatactgaagcagattaaactaattatgttccacaatcgaaaataccatggacactagcgactagttacaatagttacaaaccagtttgtttctatggattatttgattgaaggaatgaatgtaacacaccatttcatttagttacacatgcaaaagtacagaaatcgtgaatgtttaactttacatgactgcaatgtagacaaactaccatggatgaacattttgtgcactaacactgaacgtcggtagctggaaggagtaaaaaacacagtaccaataccagctattttttccacaaggcaacatcgaaatattgagggccatgttacacatgatctgacttttcaatttaggctggatacatgactagttggatactgctgctgcctgattcagcaaacggacggcatatgccagcggactgactaggatttgtggttcagaataaaaatatggtttgcagtgtcaattttccaggagagtgactatgtcatactaacttcatactccaataatgaagctaagctatctccatgtacatatcaaatacgaaatcatatccaagggaactaacacagtcacaaacaacaggtacacagacaattacagcacaagcgcaggagggaaataattttaactgaactaggaagaaaggaaacacaactcattttttattgatatatgttggatgaatccaataaaaccgatacaagtcacgaaaaatcagactagatgaatccttcgagatcacatgagcaaaagctttcgacgaaagctgtcctatagtcgtggaagcaataacacttgataaagataggaattcagacacgagaggttgcagactataagatgtcacagaacgtgggtttggagatgtacggctgagatgcctctatgcgaaggggatttcgtggtgaaacgagatgggagtagagcaacgcccgtggaagatgcttcaaacttccacacttttgagcaacgatcggcagtagtaaggtagacgatttcaagatcaaagcatatgaagataaacaacatcaacaacaaaatttgttggggttctatagagagaaacagagctacatacatacactgttttgtatctaccatctgagatgatgaaaagatgaaaaactaaagaatgccccggcgccaacgccaggacacgccgcgcgcgcgtcacccgagccatctcttgacccagccggcgctgtatatttacacacgttgcagcatcgatcaccacctgttcgatcgcgtcgccgtcacc

SEQ ID NO: 256 - DNA, 1663 bp, Oryza sativa
  source 1..1663: mol_type = other DNA
gcattgttttgatgctgctacctataaaagtatgagcttcagatgagaatttagagagctcccctgaggcaatgggttatgactttgttatcatcttagtactactcctatctaagggacggtgtaaggctgtaatctatgtgcggtgcaatgataaggctatcctttctgcgtttgatcatgacatctcatcgctgttcgattctttctcgctggcgtctgttatgttgaatgatgcaattcttctgtaagattccgcctttaccgaaatatctctagtatcaaatttaaattggagtacggatcctctttgaacatacggatctatttgagataattttgtctgatcatcaacgagaactcggaagcgtgccaaccttgtgggtcaattgtaacgataaagcagggagaatatagttccccctttttcctctgatgatgaaatggcaggagaagtgtagttgagcctgctgttttggtgaagactgaaatggtatcagaaagtcagaatccactataaccaatacaacagcagctgatatataatcattgatcaaggaaaacaactgcagctcatagattaatgcttactagctttgtccatcaatacatacaaaaaccagtccaacagtcatggtaactgctccaaatcaaagcacgccagaagttctcttaacgcctcacacagcaggaaacacaacaacaaactggattttatttatctacacatccatcatatttacataccaagggagaatccgcaggactcattttcctttcttggtgacggcgacgcgatcgaacaggtggtgatcgatgctgcaacgtgtgtaaatatacagcgccggctgggtcaagagatggctcgggtgacgcgcgcgcggcgtgtcctggcgttggcgccggggcattctttagtttttcatcttttcatcatctcagatggtagatacaaaacagtgtatgtatgtagctctgtttctctctatagaaccccaacaaattttgttgttgatgttgtttatcttcatatgctttgatcttgaaatcgtctaccttactactgccgatcgttgctcaaaagtgtggaagtttgaagcatcttccacgggcgttgctctactcccatctcgtttcaccacgaaatccccttcgcatagaggcatctcagccgtacatctccaaacccacgttctggattcagcaaacggacggcatatgccagcggactgactaggatttgtggttcagaataaaaatatggtttgcagtgtcaattttccaggagagtgactatgtcatactaacttcatactccaataatgaagctaagctatctccatgtacatatcaaatacgaaatcatatccaagggaactaacacagtcacaaacaacaggtacacagacaattacagcacaagcgcaggagggaaataattttaactgaactaggaagaaaggaaacacaactcattttttattgatatatgttggatgaatccaataaaaccgatacaagtcacgaaaaatcagactagatgaatccttcgagatcacatgagcaaaagctttcgacgaaagctgtcctatagtcgtggaagcaataacacttgataaagataggaattcagacacgagaggttgcagactataagatgtca

SEQ ID NO: 257 - DNA, 1663 bp, Oryza sativa
  source 1..1663: mol_type = other DNA
gcattgttttgatgctgctacctataaaagtatgagcttcagatgagaatttagagagctcccctgaggcaatgggttatgactttgttatcatcttagtactactcctatctaagggacggtgtaaggctgtaatctatgtgcggtgcaatgataaggctatcctttctgcgtttgatcatgacatctcatcgctgttcgattctttctcgctggcgtctgttatgttgaatgatgcaattcttctgtaagattccgcctttaccgaaatatctctagtatcaaatttaaattggagtacggatcctctttgaacatacggatctatttgagataattttgtctgatcatcaacgagaactcggaagcgtgccaaccttgtgggtcaattgtaacgataaaaagaaaggaaaatgagtcctgcggattctcccttggtatgtaaatatgatggatgtgtagataaataaaatccagtttgttgttgtgtttcctgctgtgtgaggcgttaagagaacttctggcgtgctttgatttggagcagttaccatgactgttggactggtttttgtatgtattgatggacaaagctagtaagcattaatctatgagctgcagttgttttccttgatcaatgattatatatcagctgctgttgtattggttatagtggattctgactttctgataccatttcagtcttcaccaaaacagcaggctcaactacacttctcctgccatttcatcatcagaggaaaaagggggaactatattctccctgcggtgacggcgacgcgatcgaacaggtggtgatcgatgctgcaacgtgtgtaaatatacagcgccggctgggtcaagagatggctcgggtgacgcgcgcgcggcgtgtcctggcgttggcgccggggcattctttagtttttcatcttttcatcatctcagatggtagatacaaaacagtgtatgtatgtagctctgtttctctctatagaaccccaacaaattttgttgttgatgttgtttatcttcatatgctttgatcttgaaatcgtctaccttactactgccgatcgttgctcaaaagtgtggaagtttgaagcatcttccacgggcgttgctctactcccatctcgtttcaccacgaaatccccttcgcatagaggcatctcagccgtacatctccaaacccacgttctgtgacatcttatagtctgcaacctctcgtgtctgaattcctatctttatcaagtgttattgcttccacgactataggacagctttcgtcgaaagcttttgctcatgtgatctcgaaggattcatctagtctgatttttcgtgacttgtatcggttttattggattcatccaacatatatcaataaaaaatgagttgtgtttcctttcttcctagttcagttaaaattatttccctcctgcgcttgtgctgtaattgtctgtgtacctgttgtttgtgactgtgttagttcccttggatatgatttcgtatttgatatgtacatggagatagcttagcttcattattggagtatgaagttagtatgacatagtcactctcctggaaaattgacactgcaaaccatatttttattctgaaccacaaatcctagtcagtccgctggcatatgccgtccgtttgctgaatc

SEQ ID NO: 258 - DNA, 1663 bp, Oryza sativa
  source 1..1663: mol_type = other DNA
gattcagcaaacggacggcatatgccagcggactgactaggatttgtggttcagaataaaaatatggtttgcagtgtcaattttccaggagagtgactatgtcatactaacttcatactccaataatgaagctaagctatctccatgtacatatcaaatacgaaatcatatccaagggaactaacacagtcacaaacaacaggtacacagacaattacagcacaagcgcaggagggaaataattttaactgaactaggaagaaaggaaacacaactcattttttattgatatatgttggatgaatccaataaaaccgatacaagtcacgaaaaatcagactagatgaatccttcgagatcacatgagcaaaagctttcgacgaaagctgtcctatagtcgtggaagcaataacacttgataaagataggaattcagacacgagaggttgcagactataagatgtcacagaacgtgggtttggagatgtacggctgagatgcctctatgcgaaggggatttcgtggtgaaacgagatgggagtagagcaacgcccgtggaagatgcttcaaacttccacacttttgagcaacgatcggcagtagtaaggtagacgatttcaagatcaaagcatatgaagataaacaacatcaacaacaaaatttgttggggttctatagagagaaacagagctacatacatacactgttttgtatctaccatctgagatgatgaaaagatgaaaaactaaagaatgccccggcgccaacgccaggacacgccgcgcgcgcgtcacccgagccatctcttgacccagccggcgctgtatatttacacacgttgcagcatcgatcaccacctgttcgatcgcgtcgccgtcaccgcagggagaatatagttccccctttttcctctgatgatgaaatggcaggagaagtgtagttgagcctgctgttttggtgaagactgaaatggtatcagaaagtcagaatccactataaccaatacaacagcagctgatatataatcattgatcaaggaaaacaactgcagctcatagattaatgcttactagctttgtccatcaatacatacaaaaaccagtccaacagtcatggtaactgctccaaatcaaagcacgccagaagttctcttaacgcctcacacagcaggaaacacaacaacaaactggattttatttatctacacatccatcatatttacataccaagggagaatccgcaggactcattttcctttctttttatcgttacaattgacccacaaggttggcacgcttccgagttctcgttgatgatcagacaaaattatctcaaatagatccgtatgttcaaagaggatccgtactccaatttaaatttgatactagagatatttcggtaaaggcggaatcttacagaagaattgcatcattcaacataacagacgccagcgagaaagaatcgaacagcgatgagatgtcatgatcaaacgcagaaaggatagccttatcattgcaccgcacatagattacagccttacaccgtcccttagataggagtagtactaagatgataacaaagtcataacccattgcctcaggggagctctctaaattctcatctgaagctcatacttttataggtagcagcatcaaaacaatgc

SEQ ID NO: 259 - DNA, 1601 bp, Oryza sativa
  source 1..1601: mol_type = other DNA
aggcagcagcagtatccaactagtcatgtatccagcctaaattgaaaagtcagatcatgtgtaacatggccctcaatatttcgatgttgccttgtggaaaaaatagctggtattggtactgtgttttttactccttccagctaccgacgttcagtgttagtgcacaaaatgttcatccatggtagtttgtctacattgcagtcatgtaaagttaaacattcacgatttctgtacttttgcatgtgtaactaaatgaaatggtgtgttacattcattccttcaatcaaataatccatagaaacaaactggtttgtaactattgtaactagtcgctagtgtccatggtattttcgattgtggaacataattagtttaatctgcttcagtataacttaagccggctttatcctgtgtatgcatcagcttcgctccattgaacatccaaacatcagtataagcattttgtggcgactaatcatccggagatagggcaatgctttctaccaactgaagagtagagacgtgatgctgtgagatggaatgcaaatttcgcatattagtaagaagttggggaaggattcgaccactcactgagaagctagagcatcatggcacagtaattacaatgtaacgtagcatattcttgaacaagaacatctggtcaaataccaaccgggaaaaaatccacatcgataaagaggtgccgagtgcttacatcaacgtctttgccataatcagaacactactccgtacaagctaacacgagagcagagattacatttgcacggatgcaaaagtttccaagatagggaactggagtgaagcgagtgaggtctaggttctgttgtctgtctgtccatcatccatgtgttgactgttgagggaactcgtttcttcttttcttcacgagatgagtttttgtgtgcctgtaatactagtttgtagcaaaggctgcgttacataaggtgatgagaattgaggtaaaatgagatctgtacactaaattcattcagactgttttggcataaagaataatttggccttctgcgatttcagaagctataaattgccatctcactaaattctccttggtcctcatggcaatgcaacgacagtgtgaagcactgaagcccgtaatgctctatcaccaccatgtacaacagaaccatatatgtccatatgtacaactcgagtgttgtttgagtggccagcaaactggctgaccaagccacacgagagagaatactataaactcaatcatacataacaagcccaagcaacagaagacagaacacaacaacactcgagtctgggaacagcaacgccgatacactacagcatactgcaacgacacaaaggaattggtaaggaaatggcaccaaaatcttgtagatctttagcgagtcattcatttatagcatatgttggaacagacatgagtcacaagatttatgatagcttagataacagatggtcggaattaaccgccgagagcctatagatgaacaaaaactctgttccaccagtgttctcatgctaaaaactttctgaaataccctaccctgttcaccgaatttctccacctgttggatagcagcatt

SEQ ID NO: 260 - DNA, 1601 bp, Oryza sativa
  source 1..1601: mol_type = other DNA
aggcagcagcagtatccaactagtcatgtatccagcctaaattgaaaagtcagatcatgtgtaacatggccctcaatatttcgatgttgccttgtggaaaaaatagctggtattggtactgtgttttttactccttccagctaccgacgttcagtgttagtgcacaaaatgttcatccatggtagtttgtctacattgcagtcatgtaaagttaaacattcacgatttctgtacttttgcatgtgtaactaaatgaaatggtgtgttacattcattccttcaatcaaataatccatagaaacaaactggtttgtaactattgtaactagtcgctagtgtccatggtattttcgattgtggaacataattagtttaatctgcttcagtataacttaagccggctttatcctgtgtatgcatcagcttcgctccattgaacatccaaacatcagtataagcattttgtggcgactaatcatccggcttcactccagttccctatcttggaaacttttgcatccgtgcaaatgtaatctctgctctcgtgttagcttgtacggagtagtgttctgattatggcaaagacgttgatgtaagcactcggcacctctttatcgatgtggattttttcccggttggtatttgaccagatgttcttgttcaagaatatgctacgttacattgtaattactgtgccatgatgctctagcttctcagtgagtggtcgaatccttccccaacttcttactaatatgcgaaatttgcattccatctcacagcatcacgtctctactcttcagttggtagaaagcattgccctatctcgagtgaggtctaggttctgttgtctgtctgtccatcatccatgtgttgactgttgagggaactcgtttcttcttttcttcacgagatgagtttttgtgtgcctgtaatactagtttgtagcaaaggctgcgttacataaggtgatgagaattgaggtaaaatgagatctgtacactaaattcattcagactgttttggcataaagaataatttggccttctgcgatttcagaagctataaattgccatctcactaaattctccttggtcctcatggcaatgcaacgacagtgtgaagcactgaagcccgtaatgctctatcaccaccatgtacaacagaaccatatatgtccatatgtacaactcgagtgttgtttgagtggccagcaaactggctaatgctgctatccaacaggtggagaaattcggtgaacagggtagggtatttcagaaagtttttagcatgagaacactggtggaacagagtttttgttcatctataggctctcggcggttaattccgaccatctgttatctaagctatcataaatcttgtgactcatgtctgttccaacatatgctataaatgaatgactcgctaaagatctacaagattttggtgccatttccttaccaattcctttgtgtcgttgcagtatgctgtagtgtatcggcgttgctgttcccagactcgagtgttgttgtgttctgtcttctgttgcttgggcttgttatgtatgattgagtttatagtattctctctcgtgtggcttggtc

SEQ ID NO: 261 - DNA, 1601 bp, Oryza sativa
  source 1..1601: mol_type = other DNA
gaccaagccacacgagagagaatactataaactcaatcatacataacaagcccaagcaacagaagacagaacacaacaacactcgagtctgggaacagcaacgccgatacactacagcatactgcaacgacacaaaggaattggtaaggaaatggcaccaaaatcttgtagatctttagcgagtcattcatttatagcatatgttggaacagacatgagtcacaagatttatgatagcttagataacagatggtcggaattaaccgccgagagcctatagatgaacaaaaactctgttccaccagtgttctcatgctaaaaactttctgaaataccctaccctgttcaccgaatttctccacctgttggatagcagcattagccagtttgctggccactcaaacaacactcgagttgtacatatggacatatatggttctgttgtacatggtggtgatagagcattacgggcttcagtgcttcacactgtcgttgcattgccatgaggaccaaggagaatttagtgagatggcaatttatagcttctgaaatcgcagaaggccaaattattctttatgccaaaacagtctgaatgaatttagtgtacagatctcattttacctcaattctcatcaccttatgtaacgcagcctttgctacaaactagtattacaggcacacaaaaactcatctcgtgaagaaaagaagaaacgagttccctcaacagtcaacacatggatgatggacagacagacaacagaacctagacctcactcgagatagggcaatgctttctaccaactgaagagtagagacgtgatgctgtgagatggaatgcaaatttcgcatattagtaagaagttggggaaggattcgaccactcactgagaagctagagcatcatggcacagtaattacaatgtaacgtagcatattcttgaacaagaacatctggtcaaataccaaccgggaaaaaatccacatcgataaagaggtgccgagtgcttacatcaacgtctttgccataatcagaacactactccgtacaagctaacacgagagcagagattacatttgcacggatgcaaaagtttccaagatagggaactggagtgaagccggatgattagtcgccacaaaatgcttatactgatgtttggatgttcaatggagcgaagctgatgcatacacaggataaagccggcttaagttatactgaagcagattaaactaattatgttccacaatcgaaaataccatggacactagcgactagttacaatagttacaaaccagtttgtttctatggattatttgattgaaggaatgaatgtaacacaccatttcatttagttacacatgcaaaagtacagaaatcgtgaatgtttaactttacatgactgcaatgtagacaaactaccatggatgaacattttgtgcactaacactgaacgtcggtagctggaaggagtaaaaaacacagtaccaataccagctattttttccacaaggcaacatcgaaatattgagggccatgttacacatgatctgacttttcaatttaggctggatacatgactagttggatactgctgctgcct

SEQ ID NO: 262 - DNA, 1000 bp, Arabidopsis thaliana
  source 1..1000: mol_type = other DNA
atggagcgtgcaaggagacttgcttacagagggatcgtgaaacgtctcgtcaacgagacaaaacgccaccgtaacggcgaatcctctcttcttccgacgacgactgttactccctcaaggtatgtctcctccgtctcctcctttctccatcgccgtcgtgatgtctctggatcggcttttaccacctccggtagaaatcaacaccagacacgatcgatctccgtcgatgcgttgaagccaagcgacactttcccgcgccggcacaactcagcaacaccggatgaacaagctcagatggcgaattactgcggattcgataatctcaacacgttgattgattcgactgttccgaaatcgattcggttagattcgatgaagttttccgggatatttgatgaaggattaacggagagtcaaatgattgagcatatgagtgatttagcttcgaagaacaaagttttcaaatcgttcattggtatgggatactataacactcatgttcctcctgtgattttgcgtaatataatggagaatcctgcttggtatactcaatatactccttatcaagctgagatttctcaaggaagactcgaatctctgctcaattaccagacggttattactgatctcaccggtctaccgatgtcgaacgcttcgttgctcgatgaaggtacggcggcggcggaagcaatggcgatgtgtaataatattctaaaggggaagaagaagacgtttgttattgctagtaattgtcatcctcagactattgatgtttgcaagacgagagcggatggtttcgatttgaaagttgtgacggttgatattaaggatgtggattatagctctggtgatgtgtgtggagtgttggttcagtatccggggactgaaggggaggtgttggattatggtgagtttgttaagaatgctcatgctaatggtgttaaggttgttatggctacggatttgttggctttgacgatgttgaaaccgccgggtgagt

SEQ ID NO: 263 - DNA, 1024 bp, Arabidopsis thaliana
  source 1..1024: mol_type = other DNA
tgtgaaaccaatctggatatccctgaaatttgaataaggttatgttgtgagtttatgaagttgtggtctagtgttgtattttgtttttcttaaggataatgcatctgtgtgctttgcttatctaaaatctaaataaagtgggtttctgcattgtgactttgcacaaacttcttttgttaaaatgaataagaaatcacatcaagatttcgatgttgccttgtggaaaaaatagctggtattggtactgtgttttttactccttccagctaccgacgttcagtgttagtgcacaaaatgttcatccatggtagtttgtctacattgcagtcatgtaaagttaaacattcacgatttctgtacttttgcatgtgtaactaaatgaaatggtgtgttacattcattccttcgagtgaggtctaggttctgttgtctgtctgtccatcatccatgtgttgactgttgagggaactcgtttcttcttttcttcacgagatgagtttttgtgtgcctgtaatactagtttgtagcaaaggctgcgttacataaggtgatgagaattgaggtaaaatgagatctgtacactaaattcattcagactgttttggggtggtgatcgatgctgcaacgtgtgtaaatatacagcgccggctgggtcaagagatggctcgggtgacgcgcgcgcggcgtgtcctggcgttggcgccggggcattctttagtttttcatcttttcatcatctcagatggtagatacaaaacagtgtatgtatgtagctctgtttctctctatagaaccccaacaaattttgttgttgatgttgttttaacatcaaagagcaggaagtttttaacaaggaatctggtcgagacatccatgttctggaccagacagttttttggtttagccttaaaattccaaggttgtataagaagaacacactgtttgttattctttgcggttggtaaccaatatagtaatatcagtatttcgtctcaatctctcttgttcttataataatagaatg

SEQ ID NO: 264 - DNA, 1024 bp, Oryza sativa
  source 1..1024: mol_type = other DNA
cattctattattataagaacaagagagattgagacgaaatactgatattactatattggttaccaaccgcaaagaataacaaacagtgtgttcttcttatacaaccttggaattttaaggctaaaccaaaaaactgtctggtccagaacatggatgtctcgaccagattccttgttaaaaacttcctgctctttgatgttaaaacaacatcaacaacaaaatttgttggggttctatagagagaaacagagctacatacatacactgttttgtatctaccatctgagatgatgaaaagatgaaaaactaaagaatgccccggcgccaacgccaggacacgccgcgcgcgcgtcacccgagccatctcttgacccagccggcgctgtatatttacacacgttgcagcatcgatcaccaccccaaaacagtctgaatgaatttagtgtacagatctcattttacctcaattctcatcaccttatgtaacgcagcctttgctacaaactagtattacaggcacacaaaaactcatctcgtgaagaaaagaagaaacgagttccctcaacagtcaacacatggatgatggacagacagacaacagaacctagacctcactcgaaggaatgaatgtaacacaccatttcatttagttacacatgcaaaagtacagaaatcgtgaatgtttaactttacatgactgcaatgtagacaaactaccatggatgaacattttgtgcactaacactgaacgtcggtagctggaaggagtaaaaaacacagtaccaataccagctattttttccacaaggcaacatcgaaatcttgatgtgatttcttattcattttaacaaaagaagtttgtgcaaagtcacaatgcagaaacccactttatttagattttagataagcaaagcacacagatgcattatccttaagaaaaacaaaatacaacactagaccacaacttcataaactcacaacataaccttattcaaatttcagggatatccagattggtttcaca

SEQ ID NO: 265 - DNA, 979 bp, Oryza sativa
  source 1..979: mol_type = other DNA
ggtatgtaaatatgatggatgtgtagataaataaaatccagtttgttgttgtgtttcctgctgtgtgaggcgttaagagaacttctggcgtgctttgatttggagcagttaccatgactgttggactggtttttgtatgtattgatggacaaagctagtaagcattaatctatgagctgcagttgttttccttgatcaatggcttcactccagttccctatcttggaaacttttgcatccgtgcaaatgtaatctctgctctcgtgttagcttgtacggagtagtgttctgattatggcaaagacgttgatgtaagcactcggcacctctttatcgatgtggattttttcccggttggtatttgaccagatgttcttgttcaagaatccaacaggtggagaaattcggtgaacagggtagggtatttcagaaagtttttagcatgagaacactggtggaacagagtttttgttcatctataggctctcggcggttaattccgaccatctgttatctaagctatcataaatcttgtgactcatgtctgttccaacatatgctataaatgaatgactcgctaaagatctacaaggtgtctgaattcctatctttatcaagtgttattgcttccacgactataggacagctttcgtcgaaagcttttgctcatgtgatctcgaaggattcatctagtctgatttttcgtgacttgtatcggttttattggattcatccaacatatatcaataaaaaatgagttgtgtttcctttcttcctagttcagttgtcagcagctggccactctctagctatatctagatgcgagagaattttaaggatgtaaatcatgccttcacatgaataaatcgttcgtccgtgcgttgtgtattcatgtaaattttgacggatggtcaagtaaaaataacaatggcaaattaatttagggaagaatcaaatatgtttgcgttccttttctgag

SEQ ID NO: 266 - DNA, 979 bp, Oryza sativa
  source 1..979: mol_type = other DNA
ctcagaaaaggaacgcaaacatatttgattcttccctaaattaatttgccattgttatttttacttgaccatccgtcaaaatttacatgaatacacaacgcacggacgaacgatttattcatgtgaaggcatgatttacatccttaaaattctctcgcatctagatatagctagagagtggccagctgctgacaactgaactaggaagaaaggaaacacaactcattttttattgatatatgttggatgaatccaataaaaccgatacaagtcacgaaaaatcagactagatgaatccttcgagatcacatgagcaaaagctttcgacgaaagctgtcctatagtcgtggaagcaataacacttgataaagataggaattcagacaccttgtagatctttagcgagtcattcatttatagcatatgttggaacagacatgagtcacaagatttatgatagcttagataacagatggtcggaattaaccgccgagagcctatagatgaacaaaaactctgttccaccagtgttctcatgctaaaaactttctgaaataccctaccctgttcaccgaatttctccacctgttggattcttgaacaagaacatctggtcaaataccaaccgggaaaaaatccacatcgataaagaggtgccgagtgcttacatcaacgtctttgccataatcagaacactactccgtacaagctaacacgagagcagagattacatttgcacggatgcaaaagtttccaagatagggaactggagtgaagccattgatcaaggaaaacaactgcagctcatagattaatgcttactagctttgtccatcaatacatacaaaaaccagtccaacagtcatggtaactgctccaaatcaaagcacgccagaagttctcttaacgcctcacacagcaggaaacacaacaacaaactggattttatttatctacacatccatcatatttacatacc

SEQ ID NO: 267 - DNA, 225 bp, unidentified
  source 1..225: mol_type = other DNA; note = Artificial
ggtaccaggcagatcctgggggccctggggacctggggtaccagggagacctgggacgcctggccaggatcgggcctggccaggatcgtggtggccaggaggtcctggtggccaggggatcctggccaggatctggaggtcctggccagggggccctggggtcctggcctggaccaggtggcctggatggccggccgatctggccaggggcgcctggaggcctgg

That which is claimed is:

1. A recombinant polynucleotide construct comprising:
at least two cassettes, wherein each cassette comprises a promoter operably linked to a heterologous gene; and
at least one cross-talk blocking element;
wherein the cross-talk blocking element comprises a polynucleotide sharing at least 80% identity with at least 100 contiguous nucleotides of any one of SEQ ID NO: 1-267.

2. A recombinant polynucleotide construct comprising:
at least two cassettes, wherein each cassette comprises a promoter operably linked to a heterologous gene; and
at least one cross-talk blocking element;
wherein the cross-talk blocking element comprises any one or more motif(s) as described in Table 13.

3. A recombinant polynucleotide construct comprising:
at least two cassettes, wherein each cassette comprises a promoter operably linked to a heterologous gene; and
at least one cross-talk blocking element;
wherein the cross-talk blocking element is a Type I or Type II cross-talk blocking element.

4. The recombinant polynucleotide construct of claim 1, wherein the cross-talk blocking element is adjacent to one of the at least two cassettes.

5. The recombinant polynucleotide construct of claim 1, wherein the cross-talk blocking element is adjacent to at least two of the at least two cassettes.

6. The recombinant polynucleotide construct of claim 1, wherein at least one of the promoters of the at least two cassettes is constitutive.

7. The recombinant polynucleotide construct of claim 1, wherein at least one of the promoters of the at least two cassettes is tissue-specific or developmental stage-specific.

8. A plant cell comprising the recombinant polynucleotide construct of claim 1.

9. The plant cell of claim 8, selected from the group consisting of: maize, soybean, Arabidopsis, canola, wheat, rice, tobacco, cotton, alfalfa, sorghum, sunflower, or safflower.

10. A transgenic plant comprising the recombinant polynucleotide construct of claim 1 in at least one cell.

11. A method of modulating the expression of at least one transgene in a plant cell, the method comprising:
introducing into the plant cell the recombinant construct of claim 1,
incubating the cell under conditions that allow the expression of the transgene, and
assessing the expression of said transgene;
wherein the expression of said at least one transgene is modulated compared to that of a control plant comprising the transgene but lacking the cross-talk blocker.
